(19) United States
(12) Patent Application Publication
(10) Pub. No.: US 2005/0202437 A1
(43) Pub. Date: Sep. 15, 2005

(54) Polynucleotides and polypeptides, materials incorporating them and methods for using them

(75) Inventors: Matthew Glenn, Auckland (NZ); Ilkka Havukkala, Auckland (NZ); Mark William Lubbers, Palmerston North (NZ); James Dekker, Palmerston North (NZ)

Correspondence Address: SPECKMAN LAW GROUP PLLC, 1501 WESTERN AVE, SEATTLE, WA, 98101, US

(73) Assignees: GENESIS RESEARCH AND DEVELOPMENT CORPORATION LIMITED, Parnell (NZ); VIALACTIA BIOSCIENCES (NZ) LIMITED, Auckland (NZ)

(21) Appl. No.: 10/650,274

(22) Filed: Aug. 28, 2003

Related U.S. Application Data
(60) Provisional application No. 60/406,810, filed on Aug. 28, 2002.

(51) Int. Cl. C12Q 1/68; C07H 21/04; C12N 9/00; C12N 9/02; C12N 1/21; C12N 15/74

(52) U.S. Cl. 435/6; 435/69.1; 435/183; 435/252.3; 435/320.1; 536/23.2; 435/189

(57) ABSTRACT

Novel polynucleotides isolated from Lactobacillus rhamnosus, as well as oligonucleotide probes and primers, genetic constructs comprising the polynucleotides, biological materials, including plants, microorganisms and multicellular organisms incorporating the polynucleotides, polypeptides expressed by the polynucleotides, and methods for using the polynucleotides and polypeptides are disclosed.

### CROSS-REFERENCE TO RELATED APPLICATIONS

[0001] This application claims priority to U.S. Patent Application No. 60/406,810, filed Aug. 28, 2002.

### TECHNICAL FIELD OF THE INVENTION

[0002] This invention relates to polynucleotides isolated from lactic acid bacteria as well as to probes and primers specific to the polynucleotides; genetic constructs comprising the polynucleotides; biological materials, including plants, microorganisms and multicellular organisms, incorporating the polynucleotides; polypeptides expressed by the polynucleotides; and methods for using the polynucleotides and polypeptides.

### BACKGROUND OF THE INVENTION

[0003] The present invention relates to polynucleotides isolated from a specific strain of lactic acid bacteria, namely Lactobacillus rhamnosus HN001 (L. rhamnosus HN001). Lactic acid bacteria, and their enzymes, are the major determinants of flavor and fermentation characteristics in fermented dairy products, such as cheese and yogurt. Flavors are produced through the action of bacteria and their enzymes on proteins, carbohydrates and lipids.

[0004] Lactobacillus rhamnosus strain HN001 are heterofermentative bacteria that are Gram positive, non-motile, non-spore forming, catalase negative, facultative anaerobic rods exhibiting an optimal growth temperature of 37±1° C. and an optimum pH of 6.0-6.5. Experimental studies demonstrated that dietary supplementation with Lactobacillus rhamnosus strain HN001 induced a sustained enhancement in several aspects of both natural and acquired immunity (See PCT International Publication No. WO 99/10476). In addition, L. rhamnosus HN001, and certain other Gram-positive bacteria can specifically and directly modulate human and animal health (See, for example, Tannock et al., Applied Environ. Microbiol. 66:2578-2588, 2000; Gill et al., Brit. J. Nutrition 83:167-176; Quan Shu et al., Food and Chem. Toxicol. 38:153-161, 2000; Quan Shu et al., Intl. J. Food Microbiol. 56:87-96, 2000; Quan Shu et al., Intl. Dairy J. 9:831-836, 1999; Prasad et al., Intl. Dairy J. 8:993-1002, 1998; Sanders and Huis in't Veld, Antonie van Leeuwenhoek 76:293-315, 1999; Salminen et al., 1998. In: Lactic Acid Bacteria, Salminen S and von Wright A (eds)., Marcel Dekker Inc, New York, Basel, Hong Kong, pp. 211-253; Delcour et al., Antonie van Leeuwenhoek 76:159-184, 1999; Blum et al., Antonie van Leeuwenhoek 76:199-205, 1999; Yasui et al., Antonie van Leeuwenhoek 76:383-389, 1999; Hirayama and Rafter, Antonie van Leeuwenhoek 76:391-394, 1999; Ouwehand, 1998. In: Lactic Acid Bacteria, Salminen S and von Wright A (eds)., Marcel Dekker Inc, New York, Basel, Hong Kong, pp. 139-159; Isolauri et al., S 1998. In: Lactic Acid Bacteria, Salminen S and von Wright A (eds)., Marcel Dekker Inc, New York, Basel, Hong Kong, pp. 255-268; Lichtenstein and Goldin, 1998. In: Lactic Acid Bacteria, Salminen S and von Wright A (eds)., Marcel Dekker Inc, New York, Basel, Hong Kong, pp. 269-277; El-Nezami and Ahokas, 1998. In: Lactic Acid Bacteria, Salminen S and von Wright A (eds)., Marcel Dekker Inc, New York, Basel, Hong Kong, pp. 359-367; Nousianen et al., 1998. In: Lactic Acid Bacteria, Salminen S and von Wright A (eds)., Marcel Dekker Inc, New York, Basel, Hong Kong, pp. 437-473; Meisel and Bockelmann, Antonie van Leeuwenhoek 76:207-215, 1999; Christensen et al., Antonie van Leeuwenhoek 76:217-246, 1999; Dunne et al., Antonie van Leeuwenhoek 76:279-292, 1999). Beneficial health effects attributed to these bacteria include the following:

[0005] Increased resistance to enteric pathogens and anti-infection activity, including treatment of rotavirus infection and infantile diarrhea—due to increases in antibody production caused by an adjuvant effect, increased resistance to pathogen colonization; alteration of intestinal conditions, such as pH; and the presence of specific antibacterial substances, such as bacteriocins and organic acids.

Aid in lactose digestion—due to lactose degradation by bacterial lactase enzymes (such as beta-galactosidase) that act in the small intestine.

[0006] Anti-cancer (in particular anti-colon cancer) and anti-mutagenesis activities—due to anti-mutagenic activity; alteration of procancerous enzymatic activity of colonic microbes; reduction of the carcinogenic enzymes azoreductase, beta-glucuronidase and nitroreductase in the gut and/or faeces; stimulation of immune function; positive influence on bile salt concentration; and antioxidant effects.

Liver cancer reduction—due to aflatoxin detoxification and inhibition of mould growth.

Reduction of small bowel bacterial overgrowth—due to antibacterial activity; and decrease in toxic metabolite production from overgrowth flora.

[0007] Immune system modulation and treatment of autoimmune disorders and allergies—due to enhancement of non-specific and antigen-specific defence against infection and tumors; enhanced mucosal immunity; adjuvant effect in antigen-specific immune responses; and regulation of Th1/Th2 cells and production of cytokines.

Treatment of allergic responses to foods—due to prevention of antigen translocation into blood stream and modulation of allergenic factors in food.

Reduction of blood lipids and prevention of heart disease—due to assimilation of cholesterol by bacteria; hydrolysis of bile salts; and antioxidative effects.

Antihypertensive effect—bacterial protease or peptidase action on milk peptides produces antihypertensive peptides. Cell wall components act as ACE inhibitors

Prevention and treatment of urogenital infections—due to adhesion to urinary and vaginal tract cells resulting in competitive exclusion; and production of antibacterial substances (acids, hydrogen peroxide and biosurfactants).

[0008] Treatment of inflammatory bowel disorder and irritable bowel syndrome—due to immuno-modulation; increased resistance to pathogen colonization; alteration of intestinal conditions such as pH; production of specific antibacterial substances such as bacteriocins, organic acids and hydrogen peroxide and biosurfactants; and competitive exclusion.

Modulation of infective endocarditis—due to fibronectin receptor-mediated platelet aggregation associated with Lactobacillus sepsis.

Prevention and treatment of Helicobacter pylori infection—due to competitive colonization and antibacterial effect.

Prevention and treatment of hepatic encephalopathy—due to inhibition and/or exclusion of urease-producing gut flora.

Improved protein and carbohydrate utilisation and conversion—due to production of beneficial products by bacterial action on proteins and carbohydrates.

[0009] Other beneficial health effects associated with L. rhamnosus include: improved nutrition; regulation of colonocyte proliferation and differentiation; improved lignan and isoflavone metabolism; reduced mucosal permeability; detoxification of carcinogens and other harmful compounds; relief of constipation and diarrhea; and vitamin synthesis, in particular folate.

[0010] Peptidases are enzymes that break the peptide bonds linking the amino group of one amino acid with the carboxy group (acid group) of an adjacent amino acid in a peptide chain. The bonds are broken in a hydrolytic reaction. There is a large family of peptidase enzymes that are defined by their specificity for the particular peptides bonds that they cleave (Barrett A J, Rawlings N D and Woessner J F (Eds.) 1998. Handbook of proteolytic enzymes. Academic Press, London, UK). The two main families are exopeptidases and endopeptidases.

[0011] Exopeptidases cleave amino acids from the N- or C-terminus of a peptide chain, releasing free amino acids or short (di- and tri-) peptides. Different types of exopeptidases include:
[0012] Aminopeptidases—release a free amino acid from the N-terminus of a peptide chain;
[0013] dipeptidyl-peptidase (also known as dipeptidyl-aminopeptidases)—release a dipeptide from the N-terminus of a peptide chain;
[0014] tripeptidyl-peptidases (also known as tripeptidyl-aminopeptidases)—release a tripeptide from the N-terminus of a peptide chain);
[0015] carboxypeptidases—release a free amino acid from the C-terminus of a peptide chain;
[0016] peptidyl-dipeptidase—release a dipeptide from the C-terminus of a peptide chain;
[0017] dipeptidases—release two free amino acids from a dipeptide; and
[0018] tripeptidases—release a free amino acid and a dipeptide from a tripeptide.

[0019] Peptidases are important enzymes in the process of cheese ripening and the development of cheese flavor. The hydrolysis of milk caseins in cheese results in textural changes and the development of cheese flavors. The raft of proteolytic enzymes that cause this hydrolysis come from the lactic acid bacteria that are bound up in the cheese—either starter cultures that grow up during the manufacture of the cheese, or adventitious and adjunct non-starter lactic acid bacteria that grow in the cheese as it ripens (Law Haandrikman, Int. Dairy J. 7:1-11, 1997).

[0020] Many other enzymes can also influence dairy product flavor, and functional and textural characteristics, as well as influencing the fermentation characteristics of the bacteria, such as speed of growth, acid production and survival (Urbach, Int. Dairy J 5:877-890, 1995; Johnson and Somkuti, Biotech. Appl. Biochem. 13:196-204, 1991; El Soda and Pandian, J. Dairy Sci. 74:2317-2335, 1991; Fox et al,. In Cheese: chemistry, physics and microbiology. Volume 1, General aspects, 2^{nd} edition, P Fox (ed) Chapman and Hall, London; Christensen et al., Antonie van Leeuwenhoek 76:217-246, 1999; Stingle et al., J. Bacteriol. 20:6354-6360, 1999; Stingle et al., Mol. Microbiol. 32:1287-1295, 1999; Lemoine et al., Appl. Environ. Microbiol. 63:1512-3518, 1997). Enzymes influencing specific characteristics and/or functions include the following:
[0021] Lysis of cells. These enzymes are mostly cell wall hydrolases, including amidases; muramidases; lysozymes, including N-acetyl muramidase; muramidase; N-acetylglucosaminidase; and N-acetylmuramoyl-L-alanine amidase. DEAD-box helicase proteins also influence autolysis.
[0022] Carbohydrate utilization. Lactose, citrate and diacetyl metabolism, and alcohol metabolism are particularly important. The enzymes involved include beta-galactosidase, lactate dehydrogenase, citrate lyase, citrate permease, 2,3 butanediol dehydrogenase (acetoin reductase), acetolactate decarboxylase, acetolactate synthase, pyruvate decarboxylase, pyruvate formate lyase, diacetyl synthase, diacetyl reductase, alcohol decarboxylase, lactate dehydrogenase, pyruvate dehydrogenase, and aldehyde dehydrogenase.
[0023] Lipid degradation, modification or synthesis. Enzymes involved include lipases, esterases, phospholipases, serine hydrolases, desaturases, and linoleate isomerase.
[0024] Polysaccharide synthesis. Polysaccharides are important not only for potential immune enhancement and adhesion activity but are important for the texture of fermented dairy products. The enzymes involved are a series of glucosyl transferases, including beta-(1-3) glucosyl transferase, alpha-N acetylgalactosaminyl transferase, phosphogalactosyl transferase, alpha-glycosyl transferase, UDP-N-acetylglucosamine C4 epimerase and UDP-N-acetylglucosamine transferase.
[0025] Amino acid degradation. Enzymes include glutamate dehydrogenase, aminotransferases, amino acid decarboxylases, and enzymes involved in sulphur amino acid degradation including cystathione beta-lyase.

[0026] Sequencing of the genomes, or portions of the genomes, of numerous organisms, including humans, animals, microorganisms and various plant varieties, has been and is being carried out on a large scale. Polynucleotides identified using sequencing techniques may be partial or full-length genes, and may contain open reading frames, or portions of open reading frames, that encode polypeptides. Putative polypeptides may be identified based on polynucleotide sequences and further characterized. The sequencing data relating to polynucleotides thus represents valuable and useful information.

[0027] Polynucleotides and polypeptides may be analyzed for varying degrees of novelty by comparing identified sequences to sequences published in various public domain databases, such as EMBL. Newly identified polynucleotides and corresponding putative polypeptides may also be compared to polynucleotides and polypeptides contained in public domain information to ascertain homology to known polynucleotides and polypeptides. In this way, the degree of similarity, identity or homology of polynucleotides and polypeptides having an unknown function may be determined relative to polynucleotides and polypeptides having known functions.

[0028] Information relating to the sequences of isolated polynucleotides may be used in a variety of ways. Specified polynucleotides having a particular sequence may be isolated, or synthesized, for use in in vivo or in vitro experimentation as probes or primers. Alternatively, collections of sequences of isolated polynucleotides may be stored using magnetic or optical storage medium and analyzed or manipulated using computer hardware and software, as well as other types of tools.

### SUMMARY OF THE INVENTION

[0029] The present invention provides isolated polynucleotides comprising a sequence selected from the group consisting of: (a) sequences identified in the attached Sequence Listing as SEQ ID NOS: 1-80; (b) variants of those sequences; (c) extended sequences comprising the sequences set out in SEQ ID NOS: 1-80, and their variants; and (d) sequences comprising at least a specified number of contiguous residues of a sequence of SEQ ID NOS: 1-80 (x-mers). Oligonucleotide probes and primers corresponding to the sequences set out in SEQ ID NOS: 1-80, and their variants are also provided. All of these polynucleotides and oligonucleotide probes and primers are collectively referred to herein, as “polynucleotides of the present invention.”

[0030] The polynucleotide sequences identified as SEQ ID NOS: 1-80 were derived from a microbial source, namely from fragmented genomic DNA of Lactobacillus rhamnosus, strain HN001, described in PCT International Publication No. WO 99/10476. Lactobacillus rhamnosus strain HN001 are heterofermentative bacteria that are Gram positive, non-motile, non-spore forming, catalase negative, facultative anaerobic rods exhibiting an optimal growth temperature of 37±1° C. and an optimum pH of 6.0-6.5. Experimental studies demonstrated that dietary supplementation with Lactobacillus rhamnosus strain HN001 induced a sustained enhancement in several aspects of both natural and acquired immunity. A biologically pure culture of Lactobacillus rhamnosus strain HN001 was deposited at the Australian Government Analytical Laboratories (AGAL), The New South Wales Regional Laboratory, 1 Suakin Street, Pymble, NSW 2073, Australia, as Deposit No. NM97/09514, dated 18 Aug. 1997.

[0031] Certain of the polynucleotide sequences disclosed herein are “partial” sequences in that they do not represent a full-length gene encoding a full-length polypeptide. Such partial sequences may be extended by analyzing and sequencing various DNA libraries using primers and/or probes and well-known hybridization and/or PCR techniques. The partial sequences disclosed herein may thus be extended until an open reading frame encoding a polypeptide, a full-length polynucleotide and/or gene capable of expressing a polypeptide, or another useful portion of the genome is identified. Such extended sequences, including full-length polynucleotides and genes, are described as “corresponding to” a sequence identified as one of the sequences of SEQ ID NOS: 1-80 or a variant thereof, or a portion of one of the sequences of SEQ ID NOS: 1-80 or a variant thereof, when the extended polynucleotide comprises an identified sequence or its variant, or an identified contiguous portion (x-mer) of one of the sequences of SEQ ID NOS: 1-80 or a variant thereof.

[0032] The polynucleotides identified as SEQ ID NOS: 1-80 were isolated from Lactobacillus rhamnosus genomic DNA clones and represent sequences that are present in the cells from which the DNA was prepared. The sequence information may be used to identify and isolate, or synthesize, DNA molecules such as promoters, DNA-binding elements, open reading frames or full-length genes, that then can be used as expressible or otherwise functional DNA in transgenic organisms. Similarly, RNA sequences, reverse sequences, complementary sequences, antisense sequences and the like, corresponding to the polynucleotides of the present invention, may be routinely ascertained and obtained using the polynucleotides identified as SEQ ID NOS: 1-80.

[0033] The present invention further provides isolated polypeptides encoded, or partially encoded, by the polynucleotides disclosed herein. In certain specific embodiments, the polypeptides of the present invention comprise a sequence selected from the group consisting of sequences identified as SEQ ID NO: 81-183, and variants thereof. Polypeptides encoded by the polynucleotides of the present invention may be expressed and used in various assays to determine their biological activity. Such polypeptides may be used to raise antibodies, to isolate corresponding interacting proteins or other compounds, and to quantitatively determine levels of interacting proteins or other compounds.

[0034] Genetic constructs comprising the inventive polynucleotides are also provided, together with transgenic host cells comprising such constructs and transgenic organisms, such as microbes, comprising such cells.

[0035] The present invention also contemplates methods for modulating the polynucleotide and/or polypeptide content and composition of an organism, such methods involving stably incorporating into the genome of the organism a genetic construct comprising a polynucleotide of the present invention. In one embodiment, the target organism is a microbe, preferably a microbe used in fermentation, more preferably a microbe of the genus Lactobacillus, and most preferably Lactobacillus rhamnosus, or other closely microbial related species used in the dairy industry. In a related aspect, methods for producing a microbe having an altered genotype and/or phenotype is provided, such methods comprising transforming a microbial cell with a genetic construct of the present invention to provide a transgenic cell, and cultivating the transgenic cell under conditions conducive to growth and multiplication. Organisms having an altered genotype or phenotype as a result of modulation of the level or content of a polynucleotide or polypeptide of the present invention compared to a wild-type organism, as well as components and progeny of such organisms, are contemplated by and encompassed within the present invention.

[0036] The isolated polynucleotides of the present invention may be usefully employed for the detection of lactic acid bacteria, preferably L. rhamnosus, in a sample material, using techniques well known in the art, such as polymerase chain reaction (PCR) and DNA hybridization, as detailed below.

[0037] The inventive polynucleotides and polypeptides may also be employed in methods for the selection and production of more effective probiotic bacteria; as “bioactive” (health-promoting) ingredients and health supplements for immune function enhancement; for reduction of blood lipids such as cholesterol; for production of bioactive material from genetically modified bacteria; as adjuvants; for wound healing; in vaccine development, particularly mucosal vaccines; as animal probiotics for improved animal health and productivity; in selection and production of genetically modified rumen microorganisms for improved animal nutrition and productivity, better flavor and improved milk composition; in methods for the selection and production of better natural food bacteria for improved flavor, faster flavor development, better fermentation characteristics, vitamin synthesis and improved textural characteristics; for the production of improved food bacteria through genetic modification; and for the identification of novel enzymes for the production of, for example, flavors or aroma concentrates.

[0038] The isolated polynucleotides of the present invention also have utility in genome mapping, in physical mapping, and in positional cloning of genes of more or less related microbes. Additionally, the polynucleotide sequences identified as SEQ ID NOS: 1-80, and their variants, may be used to design oligonucleotide probes and primers. Such oligonucleotide probes and primers have sequences that are substantially complementary to the polynucleotide of interest over a certain portion of the polynucleotide. Oligonucleotide probes designed using the polynucleotides of the present invention may be used to detect the presence and examine the expression patterns of genes in any organism having sufficiently similar DNA and RNA sequences in their cells, using techniques that are well known in the art, such as slot blot DNA hybridization techniques. Oligonucleotide primers designed using the polynucleotides of the present invention may be used for polymerase chain reaction (PCR) amplifications. Oligonucleotide probes and primers designed using the polynucleotides of the present invention may also be used in connection with various microarray technologies, including the microarray technology of Affymetrix (Santa Clara, Calif.).

[0039] The polynucleotides of the present invention may also be used to tag or identify an organism or derived material or product therefrom. Such tagging may be accomplished, for example, by stably introducing a non-disruptive non-functional heterologous polynucleotide identifier into an organism, the polynucleotide comprising at least a portion of a polynucleotide of the present invention.

[0040] The polynucleotides of the present invention may also be used as promoters, gene regulators, origins of DNA replication, secretion signals, cell wall or membrane anchors for genetic tools (such as expression or integration vectors).

[0041] All references cited herein, including patent references and non-patent publications, are hereby incorporated by reference in their entireties.

### BRIEF DESCRIPTION OF THE DRAWINGS

[0042] FIG. 1 shows the nucleotide sequence for L. rhamnosus strain HN001 deoD purine nucleoside phosphorylase AQ1 (SEQ ID NO: 78), showing ATG initiation and translation stop codons (boxed).

[0043] FIG. 2 shows the amino acid sequence for L. rhamnosus strain HN001 deoD purine nucleoside phosphorylase AQ1 (SEQ ID NO: 181).

[0044] FIG. 3 shows the results of UV light exposure assay measuring relative viability in response to increasing doses of UV light for AQ1⁻ HN001 strain (♦) and wild-type HN001 (▪). Results indicate that the AQ1⁻ HN001 mutant strain showed enhanced survival to exposure to UV light compared to wild-type HN001.

[0045] FIG. 4 shows the nucleotide sequence for L. rhamnosus strain HN001 relA GTP pyrophosphokinase gene AM1 (SEQ ID NO: 79) showing ATG initiation and translation stop codons (boxed).

[0046] FIG. 5 shows the amino acid sequence of L. rhamnosus strain HN001 relA GTP pyrophosphokinase gene AM1 (SEQ ID NO: 182).

[0047] FIG. 6 shows the results of UV light exposure assay measuring relative viability in response to increasing doses of UV light in AM1⁻ HN001 strain (♦) and wild-type HN001 (▪). Results indicate that the AM1⁻ HN001 mutant strain showed enhanced survival to exposure to UV light compared to wild-type HN001.

### DETAILED DESCRIPTION

[0048] The polynucleotides disclosed herein were isolated by high throughput sequencing of DNA libraries from the lactic acid bacteria Lactobacillus rhamnosus as described in Example 1. Cell wall, cell surface and secreted components of lactic acid bacteria are known to mediate immune modulation, cell adhesion and antibacterial activities, resulting in many beneficial effects including: resistance to enteric pathogens; modulation of cancer, including colon cancer; anti-mutagenesis effects; reduction of small bowel bacterial overgrowth; modulation of auto-immune disorders; reduction in allergic disorders; modulation of urogenital infections, inflammatory bowel disorder, irritable bowel syndrome, Helicobacter pylori infection and hepatic encephalopathy; reduction of infection with pathogens; regulation of colonocyte proliferation and differentiation; reduction of mucosal permeability; and relief of constipation and diarrhea. These cell components include, but are not limited to, peptidoglycans, teichoic acids, lipoteichoic acids, polysaccharides, adhesion proteins, secreted proteins, surface layer or S-layer proteins, collagen binding proteins and other cell surface proteins, and antibacterial substances such as bacteriocins and organic acids produced by these bacteria. Polynucleotides involved in the synthesis of these proteins and in the synthesis, modification, regulation, transport, synthesis and/or accumulation of precursor molecules for these proteins can be used to modulate the immune effects, antibacterial, cell adhesion and competitive exclusion effects of the bacteria or of components that might be produced by these bacteria.

[0049] In order to function effectively as probiotic bacteria, L. rhamnosus HN001 must survive environmental stress conditions in the gastrointestinal tract, as well as commercial and industrial processes. Modification of particular polynucleotides or regulatory processes has been shown to be effective against a number of stresses including oxidative stress, pH, osmotic stress, dehydration, carbon starvation, phosphate starvation, nitrogen starvation, amino acid starvation, heat or cold shock and mutagenic stress. Polynucleotides involved in stress resistance often confer multistress resistance, i.e., when exposed to one stress, surviving cells are resistant to several non-related stresses. Bacterial genes and/or processes shown to be involved in multistress resistance include:

Intracellular phosphate pools—inorganic phosphate starvation leads to the induction of pho regulon genes, and is linked to the bacterial stringent response. Gene knockouts involving phosphate receptor genes appear to lead to multistress resistance.

[0050] Intracellular guanosine pools—purine biosynthesis and scavenger pathways involve the production of phosphate-guanosine compounds that act as signal molecules in the bacterial stringent response. Gene knockouts involving purine scavenger pathway genes appear to confer multistress resistance.

Osmoregulatory molecules—small choline-based molecules, such as glycine-betaine, and sugars, such as trehalose, are protective against osmotic shock and are rapidly imported and/or synthesized in response to increasing osmolarity.

Acid resistance—lactobacilli naturally acidify their environment through the excretion of lactic acid, mainly through the cit operon genes responsible for citrate uptake and utilization.

Stress response genes—a number of genes appear to be induced or repressed by heat shock, cold shock, and increasing salt through the action of specific promoters.

[0051] The isolated polynucleotides of the present invention, and genetic constructs comprising such polynucleotides, may be employed to produce bacteria having desired phenotypes, including increased resistance to stress and improved fermentation properties.

[0052] Many enzymes are known to influence dairy product flavor, functional and textural characteristics as well as general fermentation characteristics such as speed of growth, acid production and survival. These enzymes include those involved in the metabolism of lipids, polysaccharides, amino acids and carbohydrates as well as those involved in the lysis of the bacterial cells.

[0053] The isolated polynucleotides and polypeptides of the present invention have demonstrated similarity to polynucleotides and/or polypeptides of known function. The identity and functions of the inventive polynucleotides based on such similarities are shown below in Table 1.

TABLE 1

| SEQ | SEQ ID | | |
|---|---|---|---|
| ID NO: | NO: | | |
| DNA | Polypeptide | Utility | Description |
| 1, 8, 53 | 81, 88, 145 | Removal of undesirable flavor | Homologue of lacG that encodes 6- |
| | | characteristics. | phospho-beta-galactosidase (EC |
| | | Production of desirable flavors. | 3.2.1.85). LacG is part of the lactose |
| | | Modified flavor, aroma, or | metabolism, and hydrolyzes |
| | | texture attributes. | phospholactose, the product of a |
| | | Construction of genetic vectors | phosphor-enolpyruvate-dependent |
| | | for controlled expression of RNA | phosphotransferase system. It belongs |
| | | and/or protein, fusion protein | to the glycosidase family 1 and |
| | | production, genetic modification, | contributes to flavor, including bitter |
| | | mutagenesis amplification of | flavor. |
| | | genetic material or for other | |
| | | genetic or protein manipulations. | |
| | | Altered survival characteristics: | |
| | | (survival of industrial processes, | |
| | | growth or storage in product | |
| | | formats, persistence in gut | |
| | | environment). | |
| | | Modified carbohydrate levels or | |
| | | functional properties. | |
| | | Altered metabolic properties. | |
| | | Modified lactose metabolism. | |
| | | Altered probiotic attributes. | |
| | | Improved fermentation properties | |
| | | or other industrially useful | |
| | | processes. | |
| | | Organisms or materials with | |
| | | improved health properties | |
| | | (including immunoregulatory, | |
| | | anticancer, gut health, lactose | |
| | | tolerance) | |
| 2 | 82 | Production of bioactive or | Homologue of pepS, encoding an |
| | | functional polypeptides. | aminopeptidase (EC 3.4.11.—). PepS |
| | | Removal of undesirable flavor | catalyzes the release of free amino |
| | | characteristics. | acids from peptides. |
| | | Production of desirable flavors. | Aminopeptidases are exopeptidases |
| | | Modified flavor, aroma and/or | and ubiquitous enzymes, frequently |
| | | texture attributes. | observed in animals, plants and |
| | | Construction of genetic vectors | microorganisms. They are involved in |
| | | for controlled expression of RNA | many different functions in the cell, |
| | | and/or protein, fusion protein | such as protein maturation, protein |
| | | production, genetic modification, | turnover, hydrolysis of regulatory |
| | | mutagenesis amplification of | peptides, nitrogen nutrition, |
| | | genetic material or for other | modulation of gene expression etc. |
| | | genetic or protein manipulations. | and, consequently, are considered |
| | | Altered survival characteristics: | essential enzymes. The proteolytic |
| | | survival of industrial processes, | system of lactic acid bacteria is |
| | | growth or storage in product | essential for bacterial growth in milk |
| | | formats, persistence in gut | but also for the development of the |
| | | environment. | organoleptic properties of dairy |
| | | Altered metabolic properties or | products. PepS is involved both in |
| | | regulation of metabolic | bacterial growth by supplying amino |
| | | pathways. | acids, and in the development of |
| | | Altered probiotic attributes. | flavor in dairy products, by |
| | | Organisms or materials with | hydrolyzing peptides (including bitter |
| | | improved health properties | peptides) and liberating aromatic |
| | | (including immunoregulatory, | amino acids which are important |
| | | anticancer, gut health). | precursors of aroma compounds |
| | | Altered resistance to antibiotics. | (Fernandez-Espla and Rul, Eur. J. |
| | | | Biochem. 263: 502-510, 1999). |
| 3 | 83 | Production of bioactive or | Homologue of PepC, encoding |
| | | functional polypeptides. | aminopeptidase C (EC 3.4.22.40). |
| | | Removal of undesirable flavor | PepC is also known as bleomycin |
| | | characteristics. | hydrolase, which inactivates |
| | | Production of desirable flavors. | bleomycin B2 (a cytotoxic |
| | | Modified flavor, aroma and/or | glycometallopeptide) by hydrolysis of |
| | | texture attributes. | a carboxyamide bond of b- |
| | | Construction of genetic vectors | aminoalanine. It also has general |
| | | for controlled expression of RNA | aminopeptidase activity. PepC |
| | | and/or protein, fusion protein | belongs to peptidase family C1; also |
| | | production, genetic modification, | known as the papain family of thiol |
| | | mutagenesis amplification of | proteases and is involved in flavor |
| | | genetic material or for other | production. The proteolytic system of |
| | | genetic or protein manipulations. | lactic acid bacteria is essential for |
| | | Altered survival characteristics: | bacterial growth in milk but also for |
| | | survival of industrial processes, | the development of the organoleptic |
| | | growth or storage in product | properties of dairy products. |
| | | formats, persistence in gut | |
| | | environment. | |
| | | Altered metabolic properties or | |
| | | regulation of metabolic | |
| | | pathways. | |
| | | Altered probiotic attributes. | |
| | | Organisms or materials with | |
| | | improved health properties | |
| | | (including immunoregulatory, | |
| | | anticancer, gut health). | |
| | | Altered resistance to antibiotics. | |
| 4 | 84 | Altered amino acid metabolism. | Homologue of hisC, coding for a L- |
| | | Removal of undesirable flavor | histidinol phosphate aminotransferase |
| | | characteristics. | (EC 2.6.1.9). The HisC |
| | | Production of desirable flavors. | aminotransferase is pyridoxal-5′- |
| | | Modified flavor, aroma and/or | phosphate (PLP)-dependent and is |
| | | texture attributes. | involved in the synthesis of histidine |
| | | Construction of genetic vectors | in eubacteria. HisC also has tyrosine |
| | | for controlled expression of RNA | and phenylalanine aminotransferase |
| | | and/or protein, fusion protein | activity. The biosynthesis of histidine |
| | | production, genetic modification, | is a central metabolic process in |
| | | mutagenesis amplification of | organisms ranging from bacteria to |
| | | genetic material or for other | yeast and plants. |
| | | genetic or protein manipulations. | |
| | | Altered survival characteristics: | |
| | | survival of industrial processes, | |
| | | growth or storage in product | |
| | | formats, persistence in gut | |
| | | environment. | |
| | | Altered metabolic properties. | |
| | | Altered probiotic attributes. | |
| | | Modified health properties | |
| | | (including immunoregulatory, | |
| | | anticancer, gut health). | |
| | | Modified antibiotic resistance. | |
| | | Improved fermentation properties | |
| | | or other industrially useful | |
| | | processes. | |
| 5 | 85 | Production of desirable flavors. | Homologue of mvaD coding for |
| | | Modified flavor, aroma and/or | mevalonate pyrophosphate |
| | | texture attributes. | decarboxylase (EC 4.1.1.33). MvaD |
| | | Construction of genetic vectors | is part of the mevalonate pathway for |
| | | for controlled expression of RNA | the biosynthesis of the central |
| | | and/or protein, fusion protein | isoprenoid precursor, isopentenyl |
| | | production, genetic modification, | diphosphate by catalyzing the |
| | | mutagenesis amplification of | reaction of mevalonate 5-diphosphate |
| | | genetic material or for other | with ATP to produce inorganic |
| | | genetic or protein manipulations. | phosphate, ADP, CO₂ and |
| | | Altered survival characteristics: | isopentenyl diphosphate, the building |
| | | survival of industrial processes, | block of sterol and isoprenoid |
| | | growth or storage in product | biosynthesis. |
| | | formats, persistence in gut | |
| | | environment. | |
| | | Altered metabolic properties. | |
| | | Modified carbohydrate levels or | |
| | | functional properties. | |
| | | Altered probiotic attributes. | |
| | | Organisms or materials with | |
| | | improved health properties | |
| | | (including immunoregulatory, | |
| | | anticancer, gut health). | |
| 6 | 86 | Production of desirable flavors. | Homologue of protein p60, encoded |
| | | Modified flavor, aroma and/or | by the gene termed iap. The p60 |
| | | texture attributes. | protein is a major extracellular |
| | | Construction of genetic vectors | product secreted by all isolates of L. monocytogenes. |
| | | for controlled expression of RNA | This protein has |
| | | and/or protein, fusion protein | peptidoglycan hydrolase activity but |
| | | production, genetic modification, | also influences the uptake of L. monocytogenes |
| | | mutagenesis amplification of | by non-phagocytic |
| | | genetic material or for other | cells. Proteins related to p60 are also |
| | | genetic or protein manipulations. | found in all other Listeria species. It |
| | | Altered survival characteristics: | has been shown that p60 protein is |
| | | survival of industrial processes, | among the strongest antigens in |
| | | growth or storage in product | listeriae for B- and T-cell responses. |
| | | formats, persistence in gut | The protein p60 belongs to the E. coli |
| | | environment. | nlpc/listeria p60 family. |
| | | Altered metabolic properties. | |
| | | Altered probiotic attributes. | |
| | | Modified adhesion to human or | |
| | | animal cells or cell lines. | |
| | | Organisms or materials with | |
| | | improved health properties | |
| | | (including immunoregulatory, | |
| | | anticancer, gut health) | |
| | | Altered resistance to antibiotics. | |
| | | Improved antimicrobial | |
| | | properties. | |
| 7 | 87 | Construction of genetic vectors | Homologue of elongation factors Tu |
| | | for controlled expression of RNA | (EF-Tu) and 1 alpha (EF-1alpha) that |
| | | and/or protein, fusion protein | are homologous proteins essential to |
| | | production, genetic modification, | translation in bacteria and eukaryotes, |
| | | mutagenesis amplification of | respectively. EF-Tu and EF-1alpha |
| | | genetic material or for other | are GTPases that catalyze the binding |
| | | genetic or protein manipulations. | of aminoacyl-tRNAs to the A-site of |
| | | Production of desirable flavors. | the ribosome. As they are among the |
| | | Modified flavor, aroma and/or | slowest evolving proteins known, EFs |
| | | texture attributes. | are used to study cellular functions |
| | | Altered survival characteristics: | and to root the universal tree of life |
| | | survival of industrial processes, | (Gaucher et al. Proc. Natl. Acad. Sci. |
| | | growth or storage in product | USA 98: 548-552, 2001), and are |
| | | formats, persistence in gut | therefore an excellent genetic tool. |
| | | environment. | |
| | | Altered metabolic properties or | |
| | | regulation of metabolic | |
| | | pathways. | |
| | | Altered probiotic attributes. | |
| 9 | 89 | Construction of genetic vectors | Homologue of ribonuclease HII (EC |
| | | for controlled expression of RNA | 3.1.26.4), an RNAse that specifically |
| | | and/or protein, fusion protein | degrades the RNA moiety in |
| | | production, genetic modification, | RNA/DNA hybrids. Endogenous |
| | | mutagenesis amplification of | RNase H activity plays an essential |
| | | genetic material or for other | role in biological effects mediated by |
| | | genetic or protein manipulations. | antisense oligonucleotides, molecules |
| | | Production of desirable flavors. | considered as potential agents against |
| | | Modified flavor, aroma and/or | infectious diseases and pathologies |
| | | texture attributes. | resulting from dysfunctional genes. |
| | | Altered survival characteristics: | The prokaryotic RNAse HII is the |
| | | survival of industrial processes, | evolutionary counterpart of the major |
| | | growth or storage in product | mammalian RNase H (Frank et al., |
| | | formats, persistence in gut | Proc. Natl. Acad. Sci. USA 95: 12872-12877, |
| | | environment. | 1998) and is necessary for cell |
| | | Altered metabolic properties or | survival. |
| | | regulation of metabolic | |
| | | pathways. | |
| | | Altered probiotic attributes. | |
| 10 | 90 | Production of desirable flavors. | Lipase homologue. Lipases are |
| | | Modified flavor, aroma and/or | enzymes that catalyze hydrolysis of |
| | | texture attributes. | fatty acid ester bonds in |
| | | Construction of genetic vectors | triacylglycerol (TAG) and releasing |
| | | for controlled expression of RNA | free fatty acids. The reaction is |
| | | and/or protein, fusion protein | reversible and therefore the enzyme |
| | | production, genetic modification, | can catalyze esterification of glycerol |
| | | mutagenesis amplification of | to form mono, di and triglycerides. |
| | | genetic material or for other | Free fatty acids are important in |
| | | genetic or protein manipulations. | providing flavor-bearing compounds |
| | | Altered survival characteristics: | for dairy products such as cheese, and |
| | | survival of industrial processes, | have a significant role in both flavor |
| | | growth or storage in product | and texture. Used extensively in wide |
| | | formats, persistence in gut | range of convenience foods. Short |
| | | environment. | chain fatty acids are known to have a |
| | | Altered metabolic properties. | variety of health impacts. |
| | | Modified lipid, glycolipid or free | |
| | | fatty acid levels or functional | |
| | | properties. | |
| | | Modified production of short | |
| | | chain fatty acids. | |
| | | Altered lipid metabolism. | |
| | | Altered probiotic attributes. | |
| | | Organisms or materials with | |
| | | improved health properties | |
| | | (including immunoregulatory, | |
| | | anticancer, gut health). | |
| 11 | 91 | Altered amino acid metabolism. | Homologue of hisD, encoding |
| | | Removal of undesirable flavor | histidinol dehydrogenase (HDH, EC |
| | | characteristics. | 1.1.1.23). HisD catalyzes the last two |
| | | Production of desirable flavors. | steps in the biosynthesis of L- |
| | | Modified flavor, aroma and/or | histidine: sequential NAD-dependent |
| | | texture attributes. | oxidations of L-histidinol to L- |
| | | Construction of genetic vectors | histidinaldehyde and then to L- |
| | | for controlled expression of RNA | histidine. Because hisD is absent in |
| | | and/or protein, fusion protein | mammals, it is a target for inhibition |
| | | production, genetic modification, | as part of herbicide development |
| | | mutagenesis amplification of | (Barbosa et al., Proc. Natl. Acad. Sci. |
| | | genetic material or for other | USA 99: 1859-1864, 2002). |
| | | genetic or protein manipulations. | |
| | | Altered survival characteristics: | |
| | | survival of industrial processes, | |
| | | growth or storage in product | |
| | | formats, persistence in gut | |
| | | environment. | |
| | | Altered metabolic properties. | |
| | | Altered probiotic attributes. | |
| | | Modified health properties | |
| | | (including immunoregulatory, | |
| | | anticancer, gut health). | |
| | | Modified antibiotic resistance. | |
| 11 | 92 | Altered amino acid metabolism. | Homologue of hisZ, coding for an |
| | | Removal of undesirable flavor | aminoacyl-tRNA synthetase. HisZ is |
| | | characteristics. | an essential component of the first |
| | | Production of desirable flavors. | enzyme in histidine biosynthesis with |
| | | Modified flavor, aroma and/or | ATP phosphoribosyltransferase |
| | | texture attributes. | (HisG, EC 2.4.2.17) but lacks |
| | | Construction of genetic vectors | aminoacylation activity. HisZ is also |
| | | for controlled expression of RNA | called an ATP |
| | | and/or protein, fusion protein | phosphoribosyltransferase regulatory |
| | | production, genetic modification, | subunit. HisZ is required for histidine |
| | | mutagenesis amplification of | prototrophy and directly involved in |
| | | genetic material or for other | the transferase function. Both HisG |
| | | genetic or protein manipulations. | and HisZ are required for catalyzing |
| | | Altered survival characteristics: | the ATP phosphoribosyltransferase |
| | | survival of industrial processes, | reaction. Aminoacyl-tRNA |
| | | growth or storage in product | synthetases have an essential catalytic |
| | | formats, persistence in gut | role in protein biosynthesis, but also |
| | | environment. | participate in numerous other |
| | | Regulation of amino acid | functions, including regulation of |
| | | metabolism. | gene expression and amino acid |
| | | Altered metabolic properties. | biosynthesis via transamidation |
| | | Altered probiotic attributes. | pathways (Sissler et al., Proc. Natl. |
| | | Modified health properties | Acad. Sci. USA 96: 8985-8990, 1999). |
| | | (including immunoregulatory, | Because HisD is absent in mammals, |
| | | anticancer, gut health). | it is a target for inhibition as part of |
| | | Modified antibiotic resistance. | herbicide development (Barbosa et |
| | | | al., Proc. Natl. Acad. Sci. USA |
| | | | 99: 1859-1864, 2002). |
| 12 | 93 | Altered amino acid metabolism. | Homologue of proA, coding for a |
| | | Removal of undesirable flavor | glutamate-5-semialdehyde |
| | | characteristics. | dehydrogenase (EC 1.2.1.41). ProA is |
| | | Production of desirable flavors. | also known as gamma- |
| | | Modified flavor, aroma and/or | glutamylphosphate reductase, and |
| | | texture attributes. | catalyzes the second step of proline |
| | | Construction of genetic vectors | biosynthesis, the NADPH-dependent |
| | | for controlled expression of RNA | reduction of L-gamma-glutamyl 5- |
| | | and/or protein, fusion protein | phosphate into L-glutamate 5- |
| | | production, genetic modification, | semialdehyde and phosphate. |
| | | mutagenesis amplification of | Intracellular accumulation of the |
| | | genetic material or for other | amino acid proline has been linked to |
| | | genetic or protein manipulations. | salt tolerance and virulence potential |
| | | Altered survival characteristics: | of a number of bacteria. Proline |
| | | survival of industrial processes, | biosynthesis plays an important role |
| | | growth or storage in product | in survival in osmolyte-depleted |
| | | formats, persistence in gut | environments of elevated osmolarity. |
| | | environment. | The survival of the food-borne |
| | | Altered metabolic properties. | pathogen L. monocytogenes in |
| | | Altered probiotic attributes. | hypersaline environments is |
| | | Modified health properties | attributed mainly to the accumulation |
| | | (including immunoregulatory, | of organic compounds termed |
| | | anticancer, gut health). | osmolytes. Osmolytes, often referred |
| | | Modified antibiotic resistance. | to as compatible solutes owing to |
| | | Improved antimicrobial | their compatibility with cellular |
| | | properties. | metabolism at high internal |
| | | | concentrations, can be either |
| | | | transported into the cell or |
| | | | synthesized de novo and act by |
| | | | counterbalancing the external osmotic |
| | | | strength, thus preventing water loss |
| | | | and plasmolysis. As well as its role as |
| | | | an osmoprotectant, proline may |
| | | | function as a virulence factor for |
| | | | certain pathogenic bacteria (Sleator et |
| | | | al., Appl. Environ. Microbiol. |
| | | | 67: 2571-2577, 2001). |
| 12 | 94 | Altered amino acid metabolism. | Homologue of proB, coding for |
| | | Removal of undesirable flavor | gamma-glutamyl kinase (EC |
| | | characteristics. | 2.7.2.11) also known as glutamate 5- |
| | | Production of desirable flavors. | kinase 1. ProB catalyzes the first step |
| | | Modified flavor, aroma and/or | of proline biosynthesis, the transfer of |
| | | texture attributes. | a phosphate group to glutamate to |
| | | Construction of genetic vectors | form glutamate 5-phosphate which |
| | | for controlled expression of RNA | rapidly cyclizes to 5-oxoproline. |
| | | and/or protein, fusion protein | Intracellular accumulation of the |
| | | production, genetic modification, | amino acid proline has been linked to |
| | | mutagenesis amplification of | the salt tolerance and virulence |
| | | genetic material or for other | potential of a number of bacteria. |
| | | genetic or protein manipulations. | Proline biosynthesis plays an |
| | | Altered survival characteristics: | important role in survival in |
| | | survival of industrial processes, | osmolyte-depleted environments of |
| | | growth or storage in product | elevated osmolarity. The survival of |
| | | formats, persistence in gut | the food-borne pathogen L. monocytogenes |
| | | environment. | in hypersaline |
| | | Altered metabolic properties. | environments is attributed mainly to |
| | | Altered probiotic attributes. | the accumulation of organic |
| | | Modified health properties | compounds termed osmolytes. |
| | | (including immunoregulatory, | Osmolytes, often referred to as |
| | | anticancer, gut health). | compatible solutes owing to their |
| | | Modified antibiotic resistance. | compatibility with cellular |
| | | Improved antimicrobial | metabolism at high internal |
| | | properties. | concentrations, can be either |
| | | | transported into the cell or |
| | | | synthesized de novo and act by |
| | | | counterbalancing the external osmotic |
| | | | strength, thus preventing water loss |
| | | | and plasmolysis. As well as its role as |
| | | | an osmoprotectant, proline may |
| | | | function as a virulence factor for |
| | | | certain pathogenic bacteria (Sleator et |
| | | | al., Appl. Environ. Microbiol. |
| | | | 67: 2571-2577, 2001). |
| 13 | 95 | Altered cell wall or cell surface | Homologue of vanHE or LDHD, |
| | | characteristics, structures or | encoding a D-lactate dehydrogenase |
| | | functions. | (D-LDH, EC 1.1.1.28). D-LDH |
| | | Modified adhesion to human or | reduces pyruvate to D-lactate and is |
| | | animal cells or cell lines. | involved in bacterial cell wall |
| | | Production of desirable flavors. | structure and function. VanH plays an |
| | | Modified flavor, aroma and/or | essential role in bacterial resistance to |
| | | texture attributes. | the antibiotic vancomycin. |
| | | Construction of genetic vectors | |
| | | for controlled expression of RNA | |
| | | and/or protein, fusion protein | |
| | | production, genetic modification, | |
| | | mutagenesis amplification of | |
| | | genetic material or for other | |
| | | genetic or protein manipulations. | |
| | | Altered survival characteristics: | |
| | | survival of industrial processes, | |
| | | growth or storage in product | |
| | | formats, persistence in gut | |
| | | environment. | |
| | | Altered metabolic properties. | |
| | | Altered probiotic attributes. | |
| | | Modified health properties | |
| | | (including immunoregulatory, | |
| | | anticancer, gut health). | |
| | | Modified antibiotic resistance. | |
| | | Improved antimicrobial | |
| | | properties. | |
| 14 | 96 | Altered amino acid metabolism. | Homologue of metA that encodes |
| | | Removal of undesirable flavor | homoserine O-transsuccinylase (EC |
| | | characteristics. | 2.3.1.46). MetA catalyzes the first |
| | | Production of desirable flavors. | unique step in bacterial and plant |
| | | Modified flavor, aroma and/or | methionine biosynthesis involving the |
| | | texture attributes. | activation of the gamma-hydroxyl of |
| | | Construction of genetic vectors | homoserine. The activity of this |
| | | for controlled expression of RNA | enzyme is closely regulated in vivo |
| | | and/or protein, fusion protein | and therefore represents a critical |
| | | production, genetic modification, | control point for cell growth and |
| | | mutagenesis amplification of | viability. |
| | | genetic material or for other | |
| | | genetic or protein manipulations. | |
| | | Altered survival characteristics: | |
| | | survival of industrial processes, | |
| | | growth or storage in product | |
| | | formats, persistence in gut | |
| | | environment. | |
| | | Altered metabolic properties. | |
| | | Altered probiotic attributes. | |
| | | Modified health properties | |
| | | (including immunoregulatory, | |
| | | anticancer gut health). | |
| | | Modified antibiotic resistance. | |
| 15 | 97 | Production of desirable flavors. | Homologue of plnG, encoding an |
| | | Modified flavor, aroma and/or | ATP binding cassette (ABC) |
| | | texture attributes. | transporter for the antimicrobial |
| | | Construction of genetic vectors | compound (bacteriocin) plantaricin |
| | | for controlled expression of RNA | A. PlnG displays strong similarities |
| | | and/or protein, fusion protein | to the proposed transport proteins of |
| | | production, genetic modification, | several other bacteriocins and to |
| | | mutagenesis amplification of | proteins implicated in the signal- |
| | | genetic material or for other | sequence-independent export of |
| | | genetic or protein manipulations. | Escherichia coli hemolysin, PlnH is |
| | | Altered survival characteristics: | its accessory protein (Huhne et al., |
| | | survival of industrial processes, | Microbiol. 142: 1437-1448, 1996). |
| | | growth or storage in product | |
| | | formats, persistence in gut | |
| | | environment. | |
| | | Altered metabolic properties. | |
| | | Altered probiotic attributes. | |
| | | Modified health properties | |
| | | (including immunoregulatory, | |
| | | anticancer gut health). | |
| | | Modified antibiotic resistance. | |
| | | Improved antimicrobial | |
| | | properties. | |
| 16 | 98 | Construction of genetic vectors | Homologue of hemN that encodes an |
| | | for controlled expression of RNA | oxygen-independent |
| | | and/or protein, fusion protein | coproporphyrinogen III |
| | | production, genetic modification, | dehydrogenase (EC 1.3.3.3). HemN |
| | | mutagenesis amplification of | catalyzes the oxidative |
| | | genetic material or for other | decarboxylation of |
| | | genetic or protein manipulations. | coproporphyrinogen III to yield |
| | | Production of desirable flavors. | protoporphyrinogen IX and requires |
| | | Modified flavor, aroma and/or | NADP+, ATP, Mg2+, and L- |
| | | texture attributes. | methionine. In association with |
| | | Altered survival characteristics: | specific apoproteins, it serves a wide |
| | | survival of industrial processes, | range of important functions |
| | | growth or storage in product | including electron transport (e.g., |
| | | formats, persistence in gut | cytochromes), binding and transport |
| | | environment. | of O₂ (e.g., hemoglobin), and |
| | | Altered metabolic properties or | oxidative catalysis (e.g., peroxidases) |
| | | regulation of metabolic | (Fischer et al., J. Bacteriol. |
| | | pathways. | 183: 1300-1311, 2001). |
| | | Altered probiotic attributes. | |
| | | Altered antimicrobial properties. | |
| | | Modified health properties | |
| | | (including immunoregulatory, | |
| | | anticancer gut health). | |
| 17 | 99 | Removal of undesirable flavor | Homologue of lacD, encoding |
| | | characteristics. | tagatose-1,6-bisphosphate aldolase |
| | | Modified flavor, aroma, texture | (EC 4.1.2.40). LacD is responsible |
| | | attributes. | for the aldol cleavage of tagatose-1,6- |
| | | Construction of genetic vectors | bisphosphate to form glycerone-P and |
| | | for controlled expression of RNA | glyceraldehyde 3-phosphate in the |
| | | and/or protein, fusion protein | tagatose 6-phosphate pathway of |
| | | production, genetic modification, | lactose catabolism in bacteria. The |
| | | mutagenesis amplification of | enzyme activity is stimulated by |
| | | genetic material or for other | certain divalent cations. |
| | | genetic or protein manipulations. | |
| | | Altered survival characteristics: | |
| | | (survival of industrial processes, | |
| | | growth or storage in product | |
| | | formats, persistence in gut | |
| | | environment). | |
| | | Modified carbohydrate levels or | |
| | | functional properties. | |
| | | Altered metabolic properties. | |
| | | Modified lactose metabolism. | |
| | | Altered probiotic attributes. | |
| | | Organisms or materials with | |
| | | improved health properties | |
| | | (including immunoregulatory, | |
| | | anticancer, gut health, lactose | |
| | | tolerance). | |
| 18 | 100 | Altered amino acid metabolism. | Homologue of asnH, encoding |
| | | Removal of undesirable flavor | asparagine synthetase [glutamine- |
| | | characteristics. | hydrolyzing] 2 (EC 6.3.5.4). AsnH |
| | | Altered cell wall or cell surface | transamidates asparagine, glutamate, |
| | | characteristics, structures or | AMP and diphosphate from aspartate, |
| | | functions. | glutamine and ATP as part of the |
| | | Production of desirable flavors. | asparagine biosynthesis pathway. |
| | | Modified flavor, aroma and/or | AsnH gene is also involved in cell |
| | | texture attributes. | surface organization. |
| | | Construction of genetic vectors | |
| | | for controlled expression of RNA | |
| | | and/or protein, fusion protein | |
| | | production, genetic modification, | |
| | | mutagenesis amplification of | |
| | | genetic material or for other | |
| | | genetic or protein manipulations. | |
| | | Altered survival characteristics: | |
| | | survival of industrial processes, | |
| | | growth or storage in product | |
| | | formats, persistence in gut | |
| | | environment. | |
| | | Altered metabolic properties. | |
| | | Altered probiotic attributes. | |
| | | Modified health properties | |
| | | (including immunoregulatory, | |
| | | anticancer, gut health). | |
| | | Improved fermentation properties | |
| | | or other industrially useful | |
| | | processes. | |
| 19 | 101 | Removal of undesirable flavor | Homologue of butB, encoding 2,3- |
| | | characteristics. | butanediol dehydrogenase (EC |
| | | Production of desirable flavors. | 1.1.1.4). ButB catalyzes the NAD+- |
| | | Modified flavor, aroma and/or | dependent oxidation of 2,3- |
| | | texture attributes. | butanediol acetoin, as well as the |
| | | Construction of genetic vectors | corresponding reverse reactions. It |
| | | for controlled expression of RNA | can also reduce diacetyl to acetoin. |
| | | and/or protein, fusion protein | Diacetyl is an important flavor |
| | | production, genetic modification, | compound in dairy products. |
| | | mutagenesis amplification of | |
| | | genetic material or for other | |
| | | genetic or protein manipulations. | |
| | | Altered survival characteristics: | |
| | | survival of industrial processes, | |
| | | growth or storage in product | |
| | | formats, persistence in gut | |
| | | environment. | |
| | | Altered metabolic properties. | |
| | | Altered probiotic attributes. | |
| | | Modified health properties | |
| | | (including immunoregulatory, | |
| | | anticancer, gut health). | |
| | | Modified antibiotic resistance. | |
| | | Improved fermentation properties | |
| | | or other industrially useful | |
| | | processes. | |
| 20 | 102 | Altered cell wall or cell surface | Homologue of a peptidoglycan |
| | | characteristics, structures or | hydrolase (N-acetylmuramoyl-L- |
| | | functions. | alanine amidase). N-acetylmuramoyl- |
| | | Modified adhesion to human or | L-alanine amidase is an autolysin |
| | | animal cells or cell lines. | involved in degrading the cell wall |
| | | Production of desirable flavors. | during cell growth or programmed |
| | | Modified flavor, aroma and/or | cell death and is involved in cell |
| | | texture attributes. | growth and important for releasing |
| | | Construction of genetic vectors | enzymes important for flavor. |
| | | for controlled expression of RNA | |
| | | and/or protein, fusion protein | |
| | | production, genetic modification, | |
| | | mutagenesis amplification of | |
| | | genetic material or for other | |
| | | genetic or protein manipulations. | |
| | | Altered survival characteristics: | |
| | | survival of industrial processes, | |
| | | growth or storage in product | |
| | | formats, persistence in gut | |
| | | environment. | |
| | | Altered metabolic properties. | |
| | | Altered probiotic attributes. | |
| | | Modified health properties | |
| | | (including immunoregulatory, | |
| | | anticancer, gut health). | |
| | | Modified antibiotic resistance. | |
| | | Improved fermentation properties | |
| | | or other industrially useful | |
| | | processes. | |
| 21, 76 | 103, 175 | Altered cell wall or cell surface | Homologue of galC, encoding |
| | | characteristics, structures or | galactosylceramidase (EC 3.2.1.46). |
| | | functions. | GalC hydrolyzes galactose ester |
| | | Modified adhesion to human or | bonds of galactosylceramide, |
| | | animal cells or cell lines. | galactosylsphingosine, |
| | | Production of desirable flavors. | monogalactosyldiglyceride and |
| | | Modified flavor, aroma and/or | lactosylceramide. It is involved in |
| | | texture attributes. | the catabolism of galactosylceramide, |
| | | Construction of genetic vectors | a major lipid in myelin, kidney and |
| | | for controlled expression of RNA | epithelial cells of small intestine and |
| | | and/or protein, fusion protein | colon. While bacteria may use galC |
| | | production, genetic modification, | to release sugars for metabolism, the |
| | | mutagenesis amplification of | by-products, including ceramide, asct |
| | | genetic material or for other | as signalling molecules in eukaryotic |
| | | genetic or protein manipulations. | cells and can lead to apoptosis or |
| | | Altered survival characteristics: | differentiation. Therefore, glaC plays |
| | | survival of industrial processes, | a role in probiotic effects and survival |
| | | growth or storage in product | in the gut environment. |
| | | formats, persistence in gut | |
| | | environment. | |
| | | Altered metabolic properties. | |
| | | Altered probiotic attributes. | |
| | | Modified health properties | |
| | | (including immunoregulatory, | |
| | | anticancer, gut health, apoptosis). | |
| | | Modified antibiotic resistance. | |
| | | Improved antimicrobial | |
| | | properties. | |
| | | Improved fermentation properties | |
| | | or other industrially useful | |
| | | processes. | |
| 22 | 104 | Production of bioactive or | Homologue of pepN, encoding |
| | | functional polypeptides. | membrane alanyl aminopeptidase |
| | | Removal of undesirable flavor | (EC 3.4.11.2), also called lysyl |
| | | characteristics. | aminopeptidase and aminopeptidase |
| | | Production of desirable flavors. | N. PepN releases the N-terminal |
| | | Modified flavor, aroma and/or | amino acid, Xaa-\|-Xbb- from a |
| | | texture attributes. | peptide, amide or arylamide. |
| | | Construction of genetic vectors | Aminopeptidases are involved in |
| | | for controlled expression of RNA | many different functions in the cell, |
| | | and/or protein, fusion protein | such as protein maturation, protein |
| | | production, genetic modification, | turnover, hydrolysis of regulatory |
| | | mutagenesis amplification of | peptides, nitrogen nutrition, |
| | | genetic material or for other | modulation of gene expression etc. |
| | | genetic or protein manipulations. | and, consequently, are considered |
| | | Altered survival characteristics: | essential enzymes. The proteolytic |
| | | survival of industrial processes, | system of lactic acid bacteria is |
| | | growth or storage in product | essential for bacterial growth in milk |
| | | formats, persistence in gut | but also for the development of the |
| | | environment. | organoleptic properties of dairy |
| | | Altered metabolic properties or | products. PepN is involved both in |
| | | regulation of metabolic | bacterial growth by supplying amino |
| | | pathways. | acids, and in the development of |
| | | Altered probiotic attributes. | flavor in dairy products, by |
| | | Organisms or materials with | hydrolyzing peptides (including bitter |
| | | improved health properties | peptides) and liberating aromatic |
| | | (including immunoregulatory, | amino acids which are important |
| | | anticancer, gut health). | precursors of aroma compounds |
| | | Altered resistance to antibiotics. | (Fernandez-Espla and Rul, Eur. J. |
| | | | Biochem. 263: 502-510, 1999). |
| 23 | 105 | Production of desirable flavors. | Homologue of mvaB, encoding 3- |
| | | Modified flavor, aroma and/or | hydroxy-3-methylglutaryl coenzyme |
| | | texture attributes. | A synthase. MvaB catalyzes the |
| | | Construction of genetic vectors | condensation of acetyl-CoA with |
| | | for controlled expression of RNA | acetoacetyl-CoA to form 3-hydroxy- |
| | | and/or protein, fusion protein | 3-methylglutaryl-CoA and CoA. |
| | | production, genetic modification, | MvaB is involved in mevalonic acid |
| | | mutagenesis amplification of | metabolism as well as in biosynthesis |
| | | genetic material or for other | of cholesterol and ubiquinone |
| | | genetic or protein manipulations. | progenitors. Terpenoids or |
| | | Altered survival characteristics: | isoprenoids constitute a vast family of |
| | | survival of industrial processes, | organic compounds that includes |
| | | growth or storage in product | sterols and carotenoids that have |
| | | formats, persistence in gut | flavor, color, texture and other |
| | | environment. | sensory impacts on food products. |
| | | Altered metabolic properties. | The terpenoids in many organisms |
| | | Modified carbohydrate levels or | share early steps in their biosynthesis, |
| | | functional properties. | including the synthesis of 3-hydroxy- |
| | | Altered probiotic attributes. | 3-methylglutaryl-coenzyme A and its |
| | | Organisms or materials with | conversion to mevalonate. |
| | | improved health properties | |
| | | (including immunoregulatory | |
| | | anticancer, gut health). | |
| 24 | 106 | Construction of genetic vectors | Homologue of hexB, one of two |
| | | for controlled expression of RNA | proteins involved in DNA mismatch |
| | | and/or protein, fusion protein | repair. The hex mismatch repair |
| | | production, genetic modification, | system of Streptococcus pneumoniae |
| | | mutagenesis amplification of | acts both during transformation (a |
| | | genetic material or for other | recombination process that directly |
| | | genetic or protein manipulations. | produces heteroduplex DNA) to |
| | | Production of desirable flavors. | correct donor strands and after DNA |
| | | Modified flavor, aroma and/or | replication to remove |
| | | texture attributes. | misincorporated nucleotides. The |
| | | Altered survival characteristics: | hexB is one of at least two proteins |
| | | survival of industrial processes, | required for mismatch repair. HexB is |
| | | growth or storage in product | homologous to the mutL protein, |
| | | formats, persistence in gut | which is required for methyl-directed |
| | | environment. | mismatch repair in Salmonella |
| | | Altered viability in response to | typhimurium and E. coli, and to the |
| | | stress conditions. | PMS1 gene product, which is likely |
| | | Altered metabolic properties or | to be involved in a mismatch |
| | | regulation of metabolic | correction system in Saccharomyces |
| | | pathways. | cerevisiae (Prudhomme et al., J. Bacteriol. |
| | | Altered probiotic attributes. | 171: 5332-5338, 1989). |
| 25 | 107 | Altered amino acid metabolism. | Homologue of araT, encoding an |
| | | Removal of undesirable flavor | aromatic amino acid aminotransferase |
| | | characteristics. | (EC 2.6.1.57). Aminotransferases |
| | | Production of desirable flavors. | have been widely applied in the |
| | | Modified flavor, aroma and/or | large-scale biosynthesis of amino |
| | | texture attributes. | acids, which are in increasing |
| | | Construction of genetic vectors | demand by the pharmaceutical |
| | | for controlled expression of RNA | industry. AraT plays a major role in |
| | | and/or protein, fusion protein | the conversion of aromatic amino |
| | | production, genetic modification, | acids to aroma compounds. AraT also |
| | | mutagenesis amplification of | has a major physiological role in the |
| | | genetic material or for other | biosynthesis of phenylalanine and |
| | | genetic or protein manipulations. | tyrosine. The enzymatic degradation |
| | | Altered survival characteristics: | of amino acids in cheese plays a |
| | | survival of industrial processes, | major role in cheese flavor |
| | | growth or storage in product | development. Indeed, degradation |
| | | formats, persistence in gut | products from aromatic, branched- |
| | | environment. | chain, and sulfurous amino acids |
| | | Altered metabolic properties. | have been identified in various |
| | | Altered probiotic attributes. | cheeses and highly contribute to their |
| | | Modified health properties | flavor or to off-flavors (Rijnen et al., |
| | | (including immunoregulatory, | Appl. Environ. Microbiol. 65: 4873-4880, |
| | | anticancer, gut health). | 1999). |
| | | Modified antibiotic resistance. | |
| | | Improved fermentation properties | |
| | | or other industrially useful | |
| | | processes. | |
| 26 | 108 | Altered cell wall or cell surface | Homologue of tagE, encoding |
| | | characteristics, structures or | poly(glycerol-phosphate) alpha- |
| | | functions. | glucosyltransferase (EC 2.4.1.52) |
| | | Modified adhesion to human or | also called uridine diphosphate- |
| | | animal cells or cell lines. | glucose poly-(glycerol phosphate) |
| | | Production of desirable flavors. | alpha-glucosyl transferase. TagE is |
| | | Modified flavor, aroma and/or | involved in techoic acid synthesis. |
| | | texture attributes. | Techoic acid is one component of the |
| | | Construction of genetic vectors | thick peptidoglycan layers in the cell |
| | | for controlled expression of RNA | wall of Gram-positive bacteria and is |
| | | and/or protein, fusion protein | susceptible to the enzyme lysozyme |
| | | production, genetic modification, | and to penicillin. |
| | | mutagenesis amplification of | |
| | | genetic material or for other | |
| | | genetic or protein manipulations. | |
| | | Altered survival characteristics: | |
| | | survival of industrial processes, | |
| | | growth or storage in product | |
| | | formats, persistence in gut | |
| | | environment. | |
| | | Altered metabolic properties. | |
| | | Altered probiotic attributes. | |
| | | Modified health properties | |
| | | (including immunoregulatory, | |
| | | anticancer, gut health). | |
| | | Modified antibiotic resistance. | |
| | | Improved fermentation properties | |
| | | or other industrially useful | |
| | | processes. | |
| 27 | 109 | Altered amino acid metabolism. | Homologue to hisB, encoding a |
| | | Removal of undesirable flavor | histidine biosynthesis bifunctional |
| | | characteristics. | protein - includes: imidazoleglycerol- |
| | | Production of desirable flavors. | phosphate dehydratase (EC 4.2.1.19) |
| | | Modified flavor, aroma and/or | and histidinol-phosphatase (EC |
| | | texture attributes. | 3.1.3.15). HisB rearranges the |
| | | Construction of genetic vectors | imidazole glycerol phosphate by a |
| | | for controlled expression of RNA | redox-neutral dehydrative reaction to |
| | | and/or protein, fusion protein | imidazole acetol phosphate and |
| | | production, genetic modification, | catalyzes the dephosphorylation of |
| | | mutagenesis amplification of | hisidinol phosphate to histidinol, the |
| | | genetic material or for other | direct precursor of histidine. Because |
| | | genetic or protein manipulations. | hisB is absent from mammals, it has |
| | | Altered survival characteristics: | become a target for inhibition as part |
| | | survival of industrial processes, | of herbicide development (Barbosa et |
| | | growth or storage in product | al., Proc. Natl. Acad. Sci. USA |
| | | formats, persistence in gut | 99: 1859-1864, 2002). Amino acid |
| | | environment. | degradation products in various |
| | | Altered metabolic properties. | cheeses have been shown to greatly |
| | | Altered probiotic attributes. | contribute to flavor or to off-flavors |
| | | Modified health properties | (Rijnen et al., Appl. Environ. |
| | | (including immunoregulatory, | Microbiol. 65: 4873-4880, 1999). |
| | | anticancer, gut health). | |
| | | Modified antibiotic resistance. | |
| 28 | 110 | Altered amino acid metabolism. | Homologue of cysK, encoding |
| | | Removal of undesirable flavor | cysteine synthase (EC 4.2.99.8), also |
| | | characteristics. | known as O-acetyl-L-serine acetatelyase |
| | | Production of desirable flavors. | (EC 4.2.99.8). CysK catalyzes |
| | | Modified flavor, aroma and/or | the formation of L-cysteine, the last |
| | | texture attributes. | step of L-cysteine biosynthesis, from |
| | | Construction of genetic vectors | O-acetyl-L-serine and hydrogen |
| | | for controlled expression of RNA | sulfide. Cysteine synthase is involved |
| | | and/or protein, fusion protein | in the assimilatory sulfate reduction |
| | | production, genetic modification, | pathway and in the selenium |
| | | mutagenesis amplification of | incorporation into proteins, which |
| | | genetic material or for other | occurs mainly as selenocysteine, in |
| | | genetic or protein manipulations. | bacteria. Sulphur-containing amino |
| | | Altered survival characteristics: | acid metabolism is important for |
| | | survival of industrial processes, | development of aroma and flavor |
| | | growth or storage in product | compounds. |
| | | formats, persistence in gut | |
| | | environment. | |
| | | Altered metabolic properties. | |
| | | Altered probiotic attributes. | |
| | | Modified health properties | |
| | | (including immunoregulatory, | |
| | | anticancer, gut health). | |
| | | Modified antibiotic resistance. | |
| 29 | 111 | Altered cell wall or cell surface | Homologue of enn protein. Enn has |
| | | characteristics, structures or | unique Ig-binding characteristics as it |
| | | functions. | reacts preferentially with human |
| | | Modified adhesion to human or | IgG3, the tlpC gene. Enn is a |
| | | animal cells or cell lines. | membrane protein with similarity to |
| | | Production of desirable flavors. | methyl-accepting chemotaxis proteins |
| | | Modified flavor, aroma and/or | and the streptococcal M proteins |
| | | texture attributes. | homologous with immunoglobulin- |
| | | Construction of genetic vectors | binding factors. The M proteins have |
| | | for controlled expression of RNA | been studied because of their |
| | | and/or protein, fusion protein | antiphagocytic function. |
| | | production, genetic modification, | |
| | | mutagenesis amplification of | |
| | | genetic material or for other | |
| | | genetic or protein manipulations. | |
| | | Altered survival characteristics: | |
| | | survival of industrial processes, | |
| | | growth or storage in product | |
| | | formats, persistence in gut | |
| | | environment. | |
| | | Altered metabolic properties. | |
| | | Altered probiotic attributes. | |
| | | Modified health properties | |
| | | (including immunoregulatory, | |
| | | anticancer, gut health). | |
| | | Modified antibiotic resistance. | |
| | | Improved antimicrobial | |
| | | properties. | |
| 30 | 112 | Altered amino acid metabolism. | Homologue of hisE, encoding a |
| | | Removal of undesirable flavor | histidine biosynthesis protein that |
| | | characteristics. | plays a role in histidine biosynthesis. |
| | | Production of desirable flavors. | Because hisE is absent in mammals, |
| | | Modified flavor, aroma and/or | it is a target for inhibition as part of |
| | | texture attributes. | herbicide development (Barbosa et |
| | | Construction of genetic vectors | al., Proc. Natl. Acad. Sci. USA |
| | | for controlled expression of RNA | 99: 1859-1864, 2002). Amino acid |
| | | and/or protein, fusion protein | degradation products in various |
| | | production, genetic modification, | cheeses have been shown to greatly |
| | | mutagenesis amplification of | contribute to flavor or to off-flavors |
| | | genetic material or for other | (Rijnen et al., Appl. Environ. |
| | | genetic or protein manipulations. | Microbiol. 65: 4873-4880, 1999). |
| | | Altered survival characteristics: | |
| | | survival of industrial processes, | |
| | | growth or storage in product | |
| | | formats, persistence in gut | |
| | | environment. | |
| | | Altered metabolic properties. | |
| | | Altered probiotic attributes. | |
| | | Modified health properties | |
| | | (including immunoregulatory, | |
| | | anticancer, gut health). | |
| | | Modified antibiotic resistance. | |
| 30 | 113 | Altered amino acid metabolism. | Homologue of hisI, encoding a |
| | | Removal of undesirable flavor | histidine biosynthesis protein that |
| | | characteristics. | plays a role in histidine biosynthesis. |
| | | Production of desirable flavors. | Because hisI is absent in mammals, it |
| | | Modified flavor, aroma and/or | is a target for inhibition as part of |
| | | texture attributes. | herbicide development (Barbosa et |
| | | Construction of genetic vectors | al., Proc. Natl. Acad. Sci. USA |
| | | for controlled expression of RNA | 99: 1859-1864, 2002). Amino acid |
| | | and/or protein, fusion protein | degradation products in various |
| | | production, genetic modification, | cheeses have been shown to greatly |
| | | mutagenesis amplification of | contribute to flavor or to off-flavors |
| | | genetic material or for other | (Rijnen et al., Appl. Environ. |
| | | genetic or protein manipulations. | Microbiol. 65: 4873-4880, 1999). |
| | | Altered survival characteristics: | |
| | | survival of industrial processes, | |
| | | growth or storage in product | |
| | | formats, persistence in gut | |
| | | environment. | |
| | | Altered metabolic properties. | |
| | | Altered probiotic attributes. | |
| | | Modified health properties | |
| | | (including immunoregulatory, | |
| | | anticancer, gut health). | |
| | | Modified antibiotic resistance. | |
| 31 | 114 | Production of desirable flavors. | Homologue of estA, encoding a |
| | | Modified flavor, aroma and/or | serine-dependent arylesterase (EC |
| | | texture attributes. | 3.1.1.2). EstA hydrolyzes a variety of |
| | | Construction of genetic vectors | ester compounds and prefers those |
| | | for controlled expression of RNA | with substituted phenyl alcohol or |
| | | and/or protein, fusion protein | short-chain fatty acid groups. |
| | | production, genetic modification, | Arylsesterases are responsible for the |
| | | mutagenesis amplification of | production of important flavor |
| | | genetic material or for other | compounds and intermediates. |
| | | genetic or protein manipulations. | |
| | | Altered survival characteristics: | |
| | | survival of industrial processes, | |
| | | growth or storage in product | |
| | | formats, persistence in gut | |
| | | environment. | |
| | | Altered metabolic properties. | |
| | | Modified lipid, glycolipid or free | |
| | | fatty acid levels or functional | |
| | | properties. | |
| | | Modified production of short | |
| | | chain fatty acids. | |
| | | Altered lipid metabolism. | |
| | | Altered probiotic attributes. | |
| | | Organisms or materials with | |
| | | improved health properties | |
| | | (including immunoregulatory, | |
| | | anticancer, gut health). | |
| 32 | 115 | Altered amino acid metabolism. | Homologue of glnA that encodes a |
| | | Removal of undesirable flavor | glutamine synthetase (EC 6.3.1.2), |
| | | characteristics. | also called glutamate-ammonia |
| | | Production of desirable flavors. | ligase. GlnA catalyzes the first step in |
| | | Modified flavor, aroma and/or | the conversion of inorganic nitrogen |
| | | texture attributes. | (ammonium) into its organic form |
| | | Construction of genetic vectors | glutamine (Gln). Bacterial glutamine |
| | | for controlled expression of RNA | synthetase export is associated with |
| | | and/or protein, fusion protein | pathogenicity and with the formation |
| | | production, genetic modification, | of a poly-L-glutamate/glutamine cell |
| | | mutagenesis amplification of | wall structure. Glutamine synthetase |
| | | genetic material or for other | is an enzyme that plays a central role |
| | | genetic or protein manipulations. | in the nitrogen metabolism. The |
| | | Altered survival characteristics: | enzyme and its products have roles in |
| | | survival of industrial processes, | flavor and growth. |
| | | growth or storage in product | |
| | | formats, persistence in gut | |
| | | environment. | |
| | | Altered metabolic properties. | |
| | | Altered probiotic attributes. | |
| | | Modified health properties | |
| | | (including immunoregulatory, | |
| | | anticancer, gut health). | |
| | | Altered cell wall or cell surface | |
| | | characteristics, structures or | |
| | | functions. | |
| 32 | 116 | Altered cell wall or cell surface | Homologue of Lipopolysaccharide |
| | | characteristics, structures or | synthesis protein yohJ. YohJ is |
| | | functions. | involved in techoic acid synthesis and |
| | | Modified adhesion to human or | important for cell wall functions |
| | | animal cells or cell lines. | including adhesion, immune cell |
| | | Production of desirable flavors. | interaction and product texture. |
| | | Modified flavor, aroma and/or | |
| | | texture attributes. | |
| | | Construction of genetic vectors | |
| | | for controlled expression of RNA | |
| | | and/or protein, fusion protein | |
| | | production, genetic modification, | |
| | | mutagenesis amplification of | |
| | | genetic material or for other | |
| | | genetic or protein manipulations. | |
| | | Altered survival characteristics: | |
| | | survival of industrial processes, | |
| | | growth or storage in product | |
| | | formats, persistence in gut | |
| | | environment. | |
| | | Altered metabolic properties. | |
| | | Altered probiotic attributes. | |
| | | Modified health properties | |
| | | (including immunoregulatory, | |
| | | anticancer, gut health). | |
| | | Modified antibiotic resistance. | |
| | | Improved antimicrobial | |
| | | properties. | |
| 33 | 117 | Production of desirable flavors. | Homologue of sorA. SorA encodes |
| | | Modified flavor, aroma and/or | the first protein of the |
| | | texture attributes. | phosphoenolpyruvate-dependent L- |
| | | Construction of genetic vectors | sorbose-specific phosphotransferase |
| | | for controlled expression of RNA | system (PTS). The ketose L-sorbose |
| | | and/or protein, fusion protein | is transported and phosphorylated |
| | | production, genetic modification, | through PTS. The enzyme is useful in |
| | | mutagenesis amplification of | carbohydrate-specific regulation of |
| | | genetic material or for other | gene expression and flavor |
| | | genetic or protein manipulations. | development. |
| | | Altered survival characteristics: | |
| | | survival of industrial processes, | |
| | | growth or storage in product | |
| | | formats, persistence in gut | |
| | | environment. | |
| | | Altered metabolic properties. | |
| | | Modified carbohydrate levels or | |
| | | functional properties. | |
| | | Altered probiotic attributes. | |
| | | Organisms or materials with | |
| | | improved health properties | |
| | | (including immunoregulatory, | |
| | | anticancer, gut health). | |
| 33 | 118 | Production of desirable flavors. | Homologue of sorF, encoding D- |
| | | Modified flavor, aroma and/or | sorbitol-6-phosphate dehydrogenase, |
| | | texture attributes. | an enzyme of the L-sorbose |
| | | Construction of genetic vectors | metabolism. The ketose L-sorbose is |
| | | for controlled expression of RNA | transported and phosphorylated |
| | | and/or protein, fusion protein | through the phosphoenolpyruvate- |
| | | production, genetic modification, | dependent L-sorbose-specific |
| | | mutagenesis amplification of | phosphotransferase system (PTS). |
| | | genetic material or for other | Useful for carbohydrate-specific |
| | | genetic or protein manipulations. | regulation of gene expression (Yebra |
| | | Altered survival characteristics: | et al., J. Bacteriol. 182: 155-163, |
| | | survival of industrial processes, | 2000). |
| | | growth or storage in product | |
| | | formats, persistence in gut | |
| | | environment. | |
| | | Altered metabolic properties. | |
| | | Modified carbohydrate levels or | |
| | | functional properties. | |
| | | Altered probiotic attributes. | |
| | | Organisms or materials with | |
| | | improved health properties | |
| | | (including immunoregulatory, | |
| | | anticancer, gut health). | |
| 34 | 119 | Production of bioactive or | Homologue of pepA, encoding a |
| | | functional polypeptides. | glutamyl aminopeptidase, which |
| | | Removal of undesirable flavor | belongs to peptidase family M42 and |
| | | characteristics. | is required for optimal growth of |
| | | Production of desirable flavors. | Lactococcus lactis MG1363 in milk. |
| | | Modified flavor, aroma and/or | PepA has DNA-binding activity that |
| | | texture attributes. | functions in transcription control and |
| | | Construction of genetic vectors | plasmid dimer resolution. |
| | | for controlled expression of RNA | Aminopeptidases are involved in |
| | | and/or protein, fusion protein | many different functions in the cell, |
| | | production, genetic modification, | such as protein maturation, protein |
| | | mutagenesis amplification of | turnover, hydrolysis of regulatory |
| | | genetic material or for other | peptides, nitrogen nutrition, |
| | | genetic or protein manipulations. | modulation of gene expression etc. |
| | | Altered survival characteristics: | and, consequently, are considered |
| | | survival of industrial processes, | essential enzymes. The proteolytic |
| | | growth or storage in product | system of lactic acid bacteria is |
| | | formats, persistence in gut | essential for bacterial growth in milk |
| | | environment. | but also for the development of the |
| | | Altered metabolic properties or | organoleptic properties of dairy |
| | | regulation of metabolic | products. PepA is involved both in |
| | | pathways. | bacterial growth by supplying amino |
| | | Altered probiotic attributes. | acids, and in the development of |
| | | Organisms or materials with | flavor in dairy products, by |
| | | improved health properties | hydrolyzing peptides (including bitter |
| | | (including immunoregulatory, | peptides) and liberating aromatic |
| | | anticancer, gut health). | amino acids which are important |
| | | | precursors of aroma compounds |
| | | | (Fernandez-Espla and Rul, Eur. J. |
| | | | Biochem. 263: 502-510, 1999). |
| 35 | 120 | Altered amino acid metabolism. | Homologue of hom, encoding a |
| | | Removal of undesirable flavor | homoserine dehydrogenase (EC |
| | | characteristics. | 1.1.1.3), an enzyme of the threonine |
| | | Production of desirable flavors. | biosynthesis pathway. Threonine is |
| | | Modified flavor, aroma and/or | derived from aspartic acid. |
| | | texture attributes. | Conversion of aspartate to |
| | | Construction of genetic vectors | homoserine proceeds with ATP |
| | | for controlled expression of RNA | activation of the B-carboxyl group as |
| | | and/or protein, fusion protein | a mixed phosphoric anhydride |
| | | production, genetic modification, | followed by two sequential NADPH- |
| | | mutagenesis amplification of | dependent reductions to homoserine. |
| | | genetic material or for other | Phosphorylation of homoserine |
| | | genetic or protein manipulations. | provides the substrate |
| | | Altered survival characteristics: | phosphohomoserine which suffers a |
| | | survival of industrial processes, | stereospecific 1,2-transposition |
| | | growth or storage in product | reaction to give threonine. The |
| | | formats, persistence in gut | enzymatic degradation of amino acids |
| | | environment. | in cheese plays a major role in cheese |
| | | Altered metabolic properties. | flavor development. Amino acid |
| | | Altered probiotic attributes. | degradation products greatly |
| | | Modified health properties | contribute to flavor or to off-flavors |
| | | (including immunoregulatory, | (Rijnen et al., Appl. Environ. |
| | | anticancer, gut health). | Microbiol. 65: 4873-4880, 1999). |
| 35 | 121 | Altered cell wall or cell surface | Homologue of flotillin. Flotillins |
| | | characteristics, structures or | behave as resident integral membrane |
| | | functions. | protein components of caveolae |
| | | Modified adhesion to human or | which are plasmalemmal |
| | | animal cells or cell lines. | microdomains and are involved in |
| | | Production of desirable flavors. | vesicular trafficking and signal |
| | | Modified flavor, aroma and/or | transduction (Huang et al., Mol. |
| | | texture attributes. | Microbiol. 31: 361-371, 1999). |
| | | Construction of genetic vectors | Flotillins (also known as epidermal |
| | | for controlled expression of RNA | surface antigens (ESAs)) belong to |
| | | and/or protein, fusion protein | the family of caveolae-associated |
| | | production, genetic modification, | integral membrane proteins and may |
| | | mutagenesis amplification of | act as a scaffolding protein within |
| | | genetic material or for other | caveolar membranes. |
| | | genetic or protein manipulations. | |
| | | Altered survival characteristics: | |
| | | survival of industrial processes, | |
| | | growth or storage in product | |
| | | formats, persistence in gut | |
| | | environment. | |
| | | Altered metabolic properties. | |
| | | Altered probiotic attributes. | |
| | | Modified health properties | |
| | | (including immunoregulatory, | |
| | | anticancer, gut health). | |
| | | Modified antibiotic resistance. | |
| | | Improved antimicrobial | |
| | | properties. | |
| 36 | 122 | Removal of undesirable flavor | Homologue of areB, encoding benzyl |
| | | characteristics. | alcohol dehydrogenase (EC 1.1.1.90). |
| | | Production of desirable flavors. | AreB catalyzes the oxidation of an |
| | | Modified flavor, aroma and/or | aromatic alcohol to an aromatic |
| | | texture attributes. | aldehyde. This enzyme enables |
| | | Construction of genetic vectors | bacteria to grow on a range of esters |
| | | for controlled expression of RNA | of aromatic alcohols and plays a role |
| | | and/or protein, fusion protein | in flavor development. |
| | | production, genetic modification, | |
| | | mutagenesis amplification of | |
| | | genetic material or for other | |
| | | genetic or protein manipulations. | |
| | | Altered survival characteristics: | |
| | | survival of industrial processes, | |
| | | growth or storage in product | |
| | | formats, persistence in gut | |
| | | environment. | |
| | | Altered metabolic properties. | |
| | | Altered probiotic attributes. | |
| | | Modified health properties | |
| | | (including immunoregulatory, | |
| | | anticancer, gut health). | |
| | | Improved fermentation properties | |
| | | or other industrially useful | |
| | | processes. | |
| 37 | 123 | Altered amino acid metabolism. | Homologue of codB, encoding a |
| | | Removal of undesirable flavor | cytosine permease. CodB mediates |
| | | characteristics. | uptake of exogenously supplied |
| | | Production of desirable flavors. | cytosine. It belongs to the ABC |
| | | Modified flavor, aroma and/or | transporter family. The cytosine |
| | | texture attributes. | permease is an integral cytoplasmic |
| | | Construction of genetic vectors | membrane protein possessing several |
| | | for controlled expression of RNA | transmembrane-spanning domains. |
| | | and/or protein, fusion protein | The enzymatic degradation of amino |
| | | production, genetic modification, | acids in cheese plays a major role in |
| | | mutagenesis amplification of | cheese flavor development. Amino |
| | | genetic material or for other | acid degradation products greatly |
| | | genetic or protein manipulations. | contribute to flavor or to off-flavors |
| | | Altered survival characteristics: | (Rijnen et al., Appl. Environ. |
| | | survival of industrial processes, | Microbiol. 65: 4873-4880, 1999). |
| | | growth or storage in product | |
| | | formats, persistence in gut | |
| | | environment. | |
| | | Altered response to stress | |
| | | conditions. | |
| | | Altered metabolic properties. | |
| | | Altered probiotic attributes. | |
| | | Modified health properties | |
| | | (including immunoregulatory, | |
| | | anticancer, gut health). | |
| | | Modified antibiotic resistance. | |
| | | Improved antimicrobial | |
| | | properties. | |
| | | Improved fermentation properties | |
| | | or other industrially useful | |
| | | processes. | |
| 38 | 124 | Construction of genetic vectors | Homologue of hsp 18, encoding a |
| | | for controlled expression of RNA | low-molecular-weight protein |
| | | and/or protein, fusion protein | belonging into a family of small heat |
| | | production, genetic modification, | shock proteins. Hsp18 is induced not |
| | | mutagenesis amplification of | only by heat shock but also at the |
| | | genetic material or for other | onset of solventogenesis. Small heat |
| | | genetic or protein manipulations. | shock proteins (sHsps) are a diverse |
| | | Production of desirable flavors. | group of heat-induced proteins that |
| | | Modified flavor, aroma and/or | are conserved in prokaryotes and |
| | | texture attributes. | eukaryotes and are especially |
| | | Altered survival characteristics: | abundant in plants. Recent in vitro |
| | | survival of industrial processes, | data indicate that sHsps act as |
| | | growth or storage in product | molecular chaperones to prevent |
| | | formats, persistence in gut | thermal aggregation of proteins by |
| | | environment. | binding non-native intermediates, |
| | | Altered viability in response to | which can then be refolded in an |
| | | stress conditions. | ATP-dependent fashion by other |
| | | Altered metabolic properties or | chaperones (Lee and Vierling, Plant. |
| | | regulation of metabolic | Physiol. 122: 189-198, 2000). |
| | | pathways. | |
| | | Altered probiotic attributes. | |
| 39 | 125 | Altered cell wall or cell surface | Homologue to mccF, encoding a |
| | | characteristics, structures or | inner membrane associated protein of |
| | | functions. | bacteria. MccF determines resistance |
| | | Production of desirable flavors. | to exogenous microcin. Possible |
| | | Modified flavor, aroma and/or | action by preventing the reentering of |
| | | texture attributes. | the cell by exported translation |
| | | Construction of genetic vectors | inhibitor microcin C7 (Gonzalez- |
| | | for controlled expression of RNA | Pastor et al., J. Bacteriol. 177: 7131-7140, |
| | | and/or protein, fusion protein | 1995). |
| | | production, genetic modification, | |
| | | mutagenesis amplification of | |
| | | genetic material or for other | |
| | | genetic or protein manipulations. | |
| | | Altered survival characteristics: | |
| | | survival of industrial processes, | |
| | | growth or storage in product | |
| | | formats, persistence in gut | |
| | | environment. | |
| | | Altered metabolic properties. | |
| | | Altered probiotic attributes. | |
| | | Modified health properties | |
| | | (including immunoregulatory, | |
| | | anticancer, gut health). | |
| | | Modified antibiotic resistance. | |
| | | Improved antimicrobial | |
| | | properties. | |
| 40 | 126 | Production of desirable flavors. | Homologue of sorE, encoding an L- |
| | | Modified flavor, aroma and/or | sorbose-1-phosphate reductase. SorF |
| | | texture attributes. | is, together with D-glucitol-6- |
| | | Construction of genetic vectors | phosphate dehydrogenase, involved |
| | | for controlled expression of RNA | in the conversion of L-sorbose-1- |
| | | and/or protein, fusion protein | phosphate to D-fructose-6-phosphate. |
| | | production, genetic modification, | SorE is involved in flavor |
| | | mutagenesis amplification of | development and carbohydrate |
| | | genetic material or for other | metabolism. |
| | | genetic or protein manipulations. | |
| | | Altered survival characteristics: | |
| | | survival of industrial processes, | |
| | | growth or storage in product | |
| | | formats, persistence in gut | |
| | | environment. | |
| | | Altered metabolic properties. | |
| | | Modified carbohydrate levels or | |
| | | functional properties. | |
| | | Altered probiotic attributes. | |
| | | Organisms or materials with | |
| | | improved health properties | |
| | | (including immunoregulatory, | |
| | | anticancer, gut health). | |
| 41 | 127 | Production of desirable flavors. | Homologue of the iolB gene, |
| | | Modified flavor, aroma and/or | encoding a cis-acting catabolite- |
| | | texture attributes. | responsive element (cre) protein |
| | | Construction of genetic vectors | involved in the iol operon of the myo- |
| | | for controlled expression of RNA | inositol catabolism pathway. Myo- |
| | | and/or protein, fusion protein | inositol is abundant in nature, |
| | | production, genetic modification, | especially in soil. Various |
| | | mutagenesis amplification of | microorganisms are able to grow on |
| | | genetic material or for other | myo-inositol as the sole carbon |
| | | genetic or protein manipulations. | source. The expression of the iol |
| | | Altered survival characteristics: | operon is under glucose repression |
| | | survival of industrial processes, | (Miwa and Fujita, J. Bacteriol. |
| | | growth or storage in product | 183: 5877-5884, 2001). |
| | | formats, persistence in gut | |
| | | environment. | |
| | | Altered metabolic properties. | |
| | | Modified carbohydrate levels or | |
| | | functional properties. | |
| | | Altered cell wall or cell surface | |
| | | characteristics, structures or | |
| | | functions. | |
| | | Modified adhesion to human or | |
| | | animal cells or cell lines. | |
| | | Altered probiotic attributes. | |
| | | Organisms or materials with | |
| | | improved health properties | |
| | | (including immunoregulatory, | |
| | | anticancer, gut health). | |
| 41 | 128 | Production of desirable flavors. | Homologue of the iolC gene, |
| | | Modified flavor, aroma and/or | encoding 2-dehydro-3- |
| | | texture attributes. | deoxygluconokinase. IolC |
| | | Construction of genetic vectors | phosphorylates the 2-deoxy-5-keto- |
| | | for controlled expression of RNA | D-gluconic acid to 2-deoxy-5-keto-D- |
| | | and/or protein, fusion protein | gluconic acid 6-phosphate and is part |
| | | production, genetic modification, | of the iol operon of the myo-inositol |
| | | mutagenesis amplification of | catabolism pathway (Yoshida et al., |
| | | genetic material or for other | J. Bacteriol. 179: 4591-4598, 1997). |
| | | genetic or protein manipulations. | Myo-inositol is abundant in nature, |
| | | Altered survival characteristics: | especially in soil. Various |
| | | survival of industrial processes, | microorganisms are able to grow on |
| | | growth or storage in product | myo-inositol as the sole carbon |
| | | formats, persistence in gut | source. The expression of the iol |
| | | environment. | operon is under glucose repression |
| | | Altered metabolic properties. | (Miwa and Fujita, J. Bacteriol. |
| | | Modified carbohydrate levels or | 183: 5877-5884, 2001). |
| | | functional properties. | |
| | | Altered cell wall or cell surface | |
| | | characteristics, structures or | |
| | | functions. | |
| | | Modified adhesion to human or | |
| | | animal cells or cell lines. | |
| | | Altered probiotic attributes. | |
| | | Organisms or materials with | |
| | | improved health properties | |
| | | (including immunoregulatory, | |
| | | anticancer, gut health). | |
| 41 | 129 | Production of desirable flavors. | Homologue of the iolE gene, |
| | | Modified flavor, aroma and/or | encoding a protein involved in the iol |
| | | texture attributes. | operon of the myo-inositol |
| | | Construction of genetic vectors | catabolism pathway. Myo-inositol is |
| | | for controlled expression of RNA | abundant in nature, especially in soil. |
| | | and/or protein, fusion protein | Various microorganisms are able to |
| | | production, genetic modification, | grow on myo-inositol as the sole |
| | | mutagenesis amplification of | carbon source. The expression of the |
| | | genetic material or for other | iol operon is under glucose repression |
| | | genetic or protein manipulations. | (Miwa and Fujita, J. Bacteriol. |
| | | Altered survival characteristics: | 183: 5877-5884, 2001). |
| | | survival of industrial processes, | |
| | | growth or storage in product | |
| | | formats, persistence in gut | |
| | | environment. | |
| | | Altered metabolic properties. | |
| | | Modified carbohydrate levels or | |
| | | functional properties. | |
| | | Altered cell wall or cell surface | |
| | | characteristics, structures or | |
| | | functions. | |
| | | Modified adhesion to human or | |
| | | animal cells or cell lines. | |
| | | Altered probiotic attributes. | |
| | | Organisms or materials with | |
| | | improved health properties | |
| | | (including immunoregulatory, | |
| | | anticancer, gut health). | |
| 41 | 130 | Production of desirable flavors. | Homologue of the iolG gene, |
| | | Modified flavor, aroma and/or | encoding inositol dehydrogenase (EC |
| | | texture attributes. | 1.1.1.18). IolG catalyzes the first |
| | | Construction of genetic vectors | reaction of the inositol catabolism, |
| | | for controlled expression of RNA | the dehydrogenation of myo-inositol |
| | | and/or protein, fusion protein | into 2-keto-myo-inositol (2-inosose) |
| | | production, genetic modification, | (Yoshida et al., J. Bacteriol. |
| | | mutagenesis amplification of | 179: 4591-4598, 1997). IolG is part of |
| | | genetic material or for other | the iol operon of the myo-inositol |
| | | genetic or protein manipulations. | catabolism pathway. Myo-inositol is |
| | | Altered survival characteristics: | abundant in nature, especially in soil. |
| | | survival of industrial processes, | Various microorganisms are able to |
| | | growth or storage in product | grow on myo-inositol as the sole |
| | | formats, persistence in gut | carbon source. The expression of the |
| | | environment. | iol operon is under glucose repression |
| | | Altered metabolic properties. | (Miwa and Fujita, J. Bacteriol. |
| | | Modified carbohydrate levels or | 183: 5877-5884, 2001). |
| | | functional properties. | |
| | | Altered cell wall or cell surface | |
| | | characteristics, structures or | |
| | | functions. | |
| | | Modified adhesion to human or | |
| | | animal cells or cell lines. | |
| | | Altered probiotic attributes. | |
| | | Organisms or materials with | |
| | | improved health properties | |
| | | (including immunoregulatory, | |
| | | anticancer, gut health). | |
| 41 | 131 | Production of desirable flavors. | Homologue of the iolJ gene, |
| | | Modified flavor, aroma and/or | encoding fructose-bisphosphate |
| | | texture attributes. | aldolase (EC 4.1.2.13) or tagatose- |
| | | Construction of genetic vectors | bisphosphate aldolase (4.1.2.40). IolJ |
| | | for controlled expression of RNA | cleaves 2-deoxy-5-keto-D-gluconic |
| | | and/or protein, fusion protein | acid 6-phosphate to yield |
| | | production, genetic modification, | dihydroxyacetone phosphate and |
| | | mutagenesis amplification of | malonic semialdehyde and is part of |
| | | genetic material or for other | the iol operon of the myo-inositol |
| | | genetic or protein manipulations. | catabolism pathway (Yoshida et al., |
| | | Altered survival characteristics: | J. Bacteriol. 179: 4591-4598, 1997). |
| | | survival of industrial processes, | Myo-inositol is abundant in nature, |
| | | growth or storage in product | especially in soil. Various |
| | | formats, persistence in gut | microorganisms are able to grow on |
| | | environment. | myo-inositol as the sole carbon |
| | | Altered metabolic properties. | source. The expression of the iol |
| | | Modified carbohydrate levels or | operon is under glucose repression |
| | | functional properties. | (Miwa and Fujita, J. Bacteriol. |
| | | Altered cell wall or cell surface | 183: 5877-5884, 2001). |
| | | characteristics, structures or | |
| | | functions. | |
| | | Modified adhesion to human or | |
| | | animal cells or cell lines. | |
| | | Altered probiotic attributes. | |
| | | Organisms or materials with | |
| | | improved health properties | |
| | | (including immunoregulatory, | |
| | | anticancer, gut health). | |
| 41 | 132 | Altered amino acid metabolism. | Homologue of mmsA or iolA, |
| | | Removal of undesirable flavor | encoding methylmalonate- |
| | | characteristics. | semialdehyde dehydrogenase. IolA |
| | | Production of desirable flavors. | converts malonic semialdehyde into |
| | | Modified flavor, aroma and/or | acetyl CoA and CO₂, the final step of |
| | | texture attributes. | inositol degradation (Yoshida et al., |
| | | Construction of genetic vectors | J. Bacteriol. 179: 4591-4598, 1997). |
| | | for controlled expression of RNA | Myo-Inositol is abundant in nature, |
| | | and/or protein, fusion protein | especially in soil. Various |
| | | production, genetic modification, | microorganisms are able to grow on |
| | | mutagenesis amplification of | myo-inositol as the sole carbon |
| | | genetic material or for other | source. The expression of the iol |
| | | genetic or protein manipulations. | operon is under glucose repression |
| | | Altered survival characteristics: | (Miwa and Fujita, J. Bacteriol. |
| | | survival of industrial processes, | 183: 5877-5884, 2001). The enzyme |
| | | growth or storage in product | is also required for growth on valine |
| | | formats, persistence in gut | and isoleucine as it is an acylating |
| | | environment. | enzyme that converts both propanal |
| | | Altered metabolic properties. | and 2-Methyl-3-oxopropanoate to |
| | | Modified carbohydrate levels or | Propanoyl-CoA. The enzymatic |
| | | functional properties. | degradation of amino acids in cheese |
| | | Altered cell wall or cell surface | plays a major role in cheese flavor |
| | | characteristics, structures or | development. Amino acid |
| | | functions. | degradation products greatly |
| | | Modified adhesion to human or | contribute to flavor or to off-flavors |
| | | animal cells or cell lines. | (Rijnen et al., Appl. Environ. |
| | | Altered probiotic attributes. | Microbiol. 65: 4873-4880, 1999). |
| | | Organisms or materials with | |
| | | improved health properties | |
| | | (including immunoregulatory, | |
| | | anticancer, gut health). | |
| 42 | 133 | Altered amino acid metabolism. | Homologue of hisF, encoding |
| | | Removal of undesirable flavor | imidazole glycerol phosphate |
| | | characteristics. | synthase subunit hisF (EC 4.1.3.—) |
| | | Production of desirable flavors. | also called IGP synthase cyclase |
| | | Modified flavor, aroma and/or | subunit. HisF links histidine and de |
| | | texture attributes. | novo purine biosynthesis and is a |
| | | Construction of genetic vectors | member of the glutamine |
| | | for controlled expression of RNA | amidotransferase family. |
| | | and/or protein, fusion protein | The enzymatic degradation of amino |
| | | production, genetic modification, | acids in cheese plays a major role in |
| | | mutagenesis amplification of | cheese flavor development. Amino |
| | | genetic material or for other | acid degradation products greatly |
| | | genetic or protein manipulations. | contribute to flavor or to off-flavors |
| | | Altered survival characteristics: | (Rijnen et al., Appl. Environ. |
| | | survival of industrial processes, | Microbiol. 65: 4873-4880, 1999). |
| | | growth or storage in product | |
| | | formats, persistence in gut | |
| | | environment. | |
| | | Altered metabolic properties. | |
| | | Altered probiotic attributes. | |
| | | Modified health properties | |
| | | (including immunoregulatory, | |
| | | anticancer, gut health). | |
| | | Modified antibiotic resistance. | |
| 43 | 134 | Construction of genetic vectors | Homologue of yqcM, encoding |
| | | for controlled expression of RNA | arsenate reductase (EC 1.97.1.5). |
| | | and/or protein, fusion protein | YqcM reduces the arsenate ion |
| | | production, genetic modification, | (H₂AsO) to arsenite ion (AsO). |
| | | mutagenesis amplification of | Arsenate is an abundant oxyanion |
| | | genetic material or for other | that, because of its ability to mimic |
| | | genetic or protein manipulations. | the phosphate group, is toxic to cells. |
| | | Production of desirable flavors. | Arsenate reductase participates to |
| | | Modified flavor, aroma and/or | achieve arsenate resistance in both |
| | | texture attributes. | prokaryotes and yeast by reducing |
| | | Altered survival characteristics: | arsenate to arsenite; the arsenite is |
| | | survival of industrial processes, | then exported by a specific |
| | | growth or storage in product | transporter. Arsenite reductase is |
| | | formats, persistence in gut | coupled to the glutathione and |
| | | environment. | glutaredoxin system for its enzyme |
| | | Altered viability in response to | activity (Bennett et al., Proc. Natl. |
| | | stress conditions. | Acad. Sci. USA 98: 13577-13582, |
| | | Altered metabolic properties or | 2001). |
| | | regulation of metabolic | |
| | | pathways. | |
| | | Altered probiotic attributes. | |
| | | Improved fermentation properties | |
| | | or other industrially useful | |
| | | processes. | |
| | | Modified health properties | |
| | | (including immunoregulatory, | |
| | | anticancer, gut health). | |
| 44 | 135 | Altered amino acid metabolism. | Homologue of cna, encoding a |
| | | Removal of undesirable flavor | collagen adhesin. Cna mediates |
| | | characteristics. | attachment of bacterial cells to |
| | | Production of desirable flavors. | collagen-containing substrata and is |
| | | Modified flavor, aroma and/or | attached to the cell wall |
| | | texture attributes. | peptidoglycan by an amide bond. |
| | | Construction of genetic vectors | |
| | | for controlled expression of RNA | |
| | | and/or protein, fusion protein | |
| | | production, genetic modification, | |
| | | mutagenesis amplification of | |
| | | genetic material or for other | |
| | | genetic or protein manipulations. | |
| | | Altered survival characteristics: | |
| | | survival of industrial processes, | |
| | | growth or storage in product | |
| | | formats, persistence in gut | |
| | | environment. | |
| | | Altered metabolic properties. | |
| | | Altered probiotic attributes. | |
| | | Modified health properties | |
| | | (including immunoregulatory, | |
| | | anticancer, gut health). | |
| | | Modified antibiotic resistance. | |
| | | Improved antimicrobial | |
| | | properties. | |
| 45, 65 | 136, 159 | Production of bioactive or | Homologue of pepQ, encoding a |
| | | functional polypeptides. | Xaa-Pro dipeptidase (EC 3.4.13.9). |
| | | Removal of undesirable flavor | PepQ hydrolyzes Xaa-Pro dipeptides |
| | | characteristics. | (but not Pro-Pro) and also acts on |
| | | Production of desirable flavors. | aminoacyl-hydroxyproline analogs |
| | | Modified flavor, aroma and/or | This peptidase belongs to peptidase |
| | | texture attributes. | family M24A (methionyl |
| | | Construction of genetic vectors | aminopeptidase family). It has a |
| | | for controlled expression of RNA | potential use in the dairy industry as a |
| | | and/or protein, fusion protein | cheese-ripening agent since proline |
| | | production, genetic modification, | release from proline-containing |
| | | mutagenesis amplification of | peptides in cheese reduces bitterness. |
| | | genetic material or for other | The proteolytic system of lactic acid |
| | | genetic or protein manipulations. | bacteria is essential for bacterial |
| | | Altered survival characteristics: | growth in milk but also for the |
| | | survival of industrial processes, | development of the organoleptic |
| | | growth or storage in product | properties of dairy products. PepQ is |
| | | formats, persistence in gut | involved both in bacterial growth by |
| | | environment. | supplying amino acids, and in the |
| | | Altered metabolic properties or | development of flavor in dairy |
| | | regulation of metabolic | products, by hydrolyzing peptides |
| | | pathways. | (including bitter peptides) and |
| | | Altered probiotic attributes. | liberating aromatic amino acids |
| | | Organisms or materials with | which are important precursors of |
| | | improved health properties | aroma compounds (Fernandez-Espla |
| | | (including immunoregulatory) | and Rul, Eur. J. Biochem. 263: 502-510, |
| | | | 1999). |
| 46 | 137 | Altered amino acid metabolism. | Homologue of argG, encoding a |
| | | Removal of undesirable flavor | argininosuccinate synthase (EC |
| | | characteristics. | 6.3.4.5). ArgG catalyzes the |
| | | Production of desirable flavors. | penultimate step of the arginine |
| | | Modified flavor, aroma and/or | biosynthesis. It belongs to the |
| | | texture attributes. | argininosuccinate synthase family. |
| | | Construction of genetic vectors | The enzymatic degradation of amino |
| | | for controlled expression of RNA | acids in cheese plays a major role in |
| | | and/or protein, fusion protein | cheese flavor development. Amino |
| | | production, genetic modification, | acid degradation products greatly |
| | | mutagenesis amplification of | contribute to flavor or to off-flavors |
| | | genetic material or for other | (Rijnen et al., Appl. Environ. |
| | | genetic or protein manipulations. | Microbiol. 65: 4873-4880, 1999). |
| | | Altered survival characteristics: | |
| | | survival of industrial processes, | |
| | | growth or storage in product | |
| | | formats, persistence in gut | |
| | | environment. | |
| | | Altered metabolic properties. | |
| | | Altered probiotic attributes. | |
| | | Modified health properties | |
| | | (including immunoregulatory, | |
| | | anticancer, gut health). | |
| | | Modified antibiotic resistance. | |
| 46 | 138 | Altered amino acid metabolism. | Homologue of argH, encoding |
| | | Removal of undesirable flavor | argininosuccinate lyase (EC 4.3.2.1). |
| | | characteristics. | ArgH catalyzes the last step in the |
| | | Production of desirable flavors. | arginine biosynthesis. |
| | | Modified flavor, aroma and/or | Argininosuccinate lyase also |
| | | texture attributes. | participates in the urea cycle, the |
| | | Construction of genetic vectors | major pathway for the detoxification |
| | | for controlled expression of RNA | of ammonia, where it catalyzes the |
| | | and/or protein, fusion protein | reversible breakdown of |
| | | production, genetic modification, | argininosuccinic acid into arginine |
| | | mutagenesis amplification of | and fumarate. The enzymatic |
| | | genetic material or for other | degradation of amino acids in cheese |
| | | genetic or protein manipulations. | plays a major role in cheese flavor |
| | | Altered survival characteristics: | development. Amino acid |
| | | survival of industrial processes, | degradation products greatly |
| | | growth or storage in product | contribute to flavor or to off-flavors |
| | | formats, persistence in gut | (Rijnen et al., Appl. Environ. |
| | | environment. | Microbiol. 65: 4873-4880, 1999). |
| | | Altered metabolic properties. | |
| | | Altered probiotic attributes. | |
| | | modified health properties | |
| | | (including immunoregulatory, | |
| | | anticancer, gut health). | |
| | | Modified antibiotic resistance. | |
| | | Improved fermentation properties | |
| | | or other industrially useful | |
| | | processes. | |
| 47 | 139 | Construction of genetic vectors | Homologue of purL, encoding a |
| | | for controlled expression of RNA | phosphoribosylformylglycinamidine |
| | | and/or protein, fusion protein | (FGAM) synthetase (EC 6.3.5.3). |
| | | production, genetic modification, | PurL catalyzes the fourth step in the |
| | | mutagenesis amplification of | biosynthesis of purines. It is involved |
| | | genetic material or for other | in multistress resistance. Purines play |
| | | genetic or protein manipulations. | essential roles in many cellular |
| | | Production of desirable flavors. | functions, including DNA replication, |
| | | Modified flavor, aroma and/or | transcription, intra- and extra-cellular |
| | | texture attributes. | signaling, energy metabolism, and as |
| | | Altered survival characteristics: | coenzymes for many biochemical |
| | | survival of industrial processes, | reactions. |
| | | growth or storage in product | |
| | | formats, persistence in gut | |
| | | environment. | |
| | | Altered viability in response to | |
| | | stress conditions. | |
| | | Altered metabolic properties or | |
| | | regulation of metabolic | |
| | | pathways. | |
| | | Altered probiotic attributes. | |
| 48 | 140 | Altered amino acid metabolism. | Homologue of hisH, encoding a |
| | | Removal of undesirable flavor | imidazole glycerol phosphate |
| | | characteristics. | synthase subunit that is also known as |
| | | Production of desirable flavors. | IGP synthase glutamine |
| | | Modified flavor, aroma and/or | amidotransferase subunit. HisH |
| | | texture attributes. | catalyzes the fifth step of the histidine |
| | | Construction of genetic vectors | biosynthesis. The hisH subunit |
| | | for controlled expression of RNA | provides the glutamine |
| | | and/or protein, fusion protein | amidotransferase activity that |
| | | production, genetic modification, | produces the ammonia necessary to |
| | | mutagenesis amplification of | hisF for the synthesis of IGP and |
| | | genetic material or for other | AICAR. The enzymatic degradation |
| | | genetic or protein manipulations. | of amino acids in cheese plays a |
| | | Altered survival characteristics: | major role in cheese flavor |
| | | survival of industrial processes, | development. Amino acid |
| | | growth or storage in product | degradation products greatly |
| | | formats, persistence in gut | contribute to flavor or to off-flavors |
| | | environment. | (Rijnen et al., Appl. Environ. |
| | | Altered metabolic properties. | Microbiol. 65: 4873-4880, 1999). |
| | | Altered probiotic attributes. | |
| | | Modified health properties | |
| | | (including immunoregulatory, | |
| | | anticancer, gut health). | |
| | | Modified antibiotic resistance. | |
| 49 | 141 | Construction of genetic vectors | Homologue of ndK, encoding |
| | | for controlled expression of RNA | nucleoside-diphosphate kinase (EC |
| | | and/or protein, fusion protein | 2.7.4.6), which converts |
| | | production, genetic modification, | (deoxy)ribonucleoside diphosphates |
| | | mutagenesis amplification of | into their corresponding |
| | | genetic material or for other | triphosphates. NdK is an ubiquitous |
| | | genetic or protein manipulations. | and nonspecific enzyme but is an |
| | | Production of desirable flavors. | important cellular enzyme that |
| | | Modified flavor, aroma and/or | monitors and maintains nucleotide |
| | | texture attributes. | pools and has been implicated in a |
| | | Altered survival characteristics: | number of regulatory processes, |
| | | survival of industrial processes, | including signal transduction, |
| | | growth or storage in product | development and cell surface |
| | | formats, persistence in gut | polysaccharide synthesis. |
| | | environment. | |
| | | Altered viability in response to | |
| | | stress conditions. | |
| | | Altered metabolic properties or | |
| | | regulation of metabolic | |
| | | pathways. | |
| | | Altered probiotic attributes. | |
| 50 | 142 | Altered cell wall or cell surface | Homologue of PrtB, a PII-type |
| | | characteristics, structures or | proteinase precursor (Lactocepin) |
| | | functions. | also called cell wall-associated serine |
| | | Modified adhesion to human or | proteinase (EC 3.4.21.96). PrtB |
| | | animal cells or cell lines. | breaks down milk proteins during the |
| | | Production of desirable flavors. | growth of the bacteria on milk and |
| | | Modified flavor, aroma and/or | that provides the peptides essential |
| | | texture attributes. | for cell growth. It has endopeptidase |
| | | Construction of genetic vectors | activity with very broad specificity. It |
| | | for controlled expression of RNA | is best known for its action on |
| | | and/or protein, fusion protein | caseins, although it has been shown |
| | | production, genetic modification, | to hydrolyze hemoglobin and |
| | | mutagenesis amplification of | oxidized insulin b-chain. Lactocepin |
| | | genetic material or for other | is a type I membrane protein, located |
| | | genetic or protein manipulations. | in the cell wall and belongs to |
| | | Altered survival characteristics: | peptidase family S8; also known as |
| | | survival of industrial processes, | the Subtilase Family. Lactocepin is |
| | | growth or storage in product | responsible for the hydrolysis of |
| | | formats, persistence in gut | casein in milk and specificity |
| | | environment. | differences between lactocepins from |
| | | Altered metabolic properties. | different starter strains may be partly |
| | | Altered probiotic attributes. | responsible for imparting different |
| | | Modified health properties | flavor qualities to cheese (Broadbent |
| | | (including immunoregulatory, | et al., Appl. Environ. Microbiol. |
| | | anticancer, gut health). | 68: 1778-1785, 2002). |
| | | Modified antibiotic resistance. | |
| | | Improved fermentation properties | |
| | | or other industrially useful | |
| | | processes. | |
| 51 | 143 | Altered amino acid metabolism. | Homologue of aspB, encoding an |
| | | Removal of undesirable flavor | aspartate aminotransferase (EC: |
| | | characteristics. | 2.6.1.1), also called aspartate |
| | | Production of desirable flavors. | transaminase. AspB catalyzes the |
| | | Modified flavor, aroma and/or | amino group transfer between amino |
| | | texture attributes. | acids and 2-oxo acids and that plays a |
| | | Construction of genetic vectors | central role in amino acid metabolism |
| | | for controlled expression of RNA | in organisms. The transferase is |
| | | and/or protein; fusion protein | important for the metabolism of |
| | | production, genetic modification, | amino acids and Krebs cycle related |
| | | mutagenesis amplification of | organic acids. It plays a role in the |
| | | genetic material or for other | production of important flavor |
| | | genetic or protein manipulations. | determinants. The enzymatic |
| | | Altered survival characteristics: | degradation of amino acids in cheese |
| | | survival of industrial processes, | plays a major role in cheese flavor |
| | | growth or storage in product | development. Amino acid |
| | | formats, persistence in gut | degradation products greatly |
| | | environment. | contribute to flavor or to off-flavors |
| | | Altered metabolic properties. | (Rijnen et al., Appl. Environ. |
| | | Altered probiotic attributes. | Microbiol. 65: 4873-4880, 1999). |
| | | Modified health properties | |
| | | (including immunoregulatory, | |
| | | anticancer, gut health). | |
| | | Modified antibiotic resistance. | |
| | | Improved fermentation properties | |
| | | or other industrially useful | |
| | | processes. | |
| 52 | 144 | Production of desirable flavors. | Homologue of iolF, encoding an |
| | | Modified flavor, aroma and/or | inositol transporter (TC#: |
| | | texture attributes. | 2.A.1.1.27). IolF transports myo- |
| | | Construction of genetic vectors | inositol into the bacterial cell. IolF is |
| | | for controlled expression of RNA | part of the iol operon of the myo- |
| | | and/or protein, fusion protein | inositol catabolism pathway. Myo- |
| | | production, genetic modification, | inositol is abundant in nature, |
| | | mutagenesis amplification of | especially in soil. Various |
| | | genetic material or for other | microorganisms are able to grow on |
| | | genetic or protein manipulations. | myo-inositol as the sole carbon |
| | | Altered survival characteristics: | source. The expression of the iol |
| | | survival of industrial processes, | operon is under glucose repression |
| | | growth or storage in product | (Miwa and Fujita, J. Bacteriol. |
| | | formats, persistence in gut | 183: 5877-5884, 2001). |
| | | environment. | |
| | | Altered metabolic properties. | |
| | | Modified carbohydrate levels or | |
| | | fnctional properties. | |
| | | Altered cell wall or cell surface | |
| | | characteristics, structures or | |
| | | functions. | |
| | | Modified adhesion to human or | |
| | | animal cells or cell lines. | |
| | | Altered probiotic attributes. | |
| | | Organisms or materials with | |
| | | improved health properties | |
| | | (including immunoregulatory, | |
| | | anticancer, gut health). | |
| 54 | 146 | Altered cell wall or cell surface | Homologue of mga4, a positive |
| | | characteristics, structures or | regulatory protein that acts as a |
| | | functions. | component of a signal transducing |
| | | Modified adhesion to human or | system. Positive regulatory proteins |
| | | animal cells or cell lines. | or activator proteins bind in their |
| | | Production of desirable flavors. | active state to DNA in the promoter |
| | | Modified flavor, aroma and/or | region and help RNA polymerase to |
| | | texture attributes. | bind and transcribe that gene. Mga4 |
| | | Construction of genetic vectors | initiates transcription of surface- |
| | | for controlled expression of RNA | associated/virulence factors. |
| | | and/or protein, fusion protein | |
| | | production, genetic modification, | |
| | | mutagenesis amplification of | |
| | | genetic material or for other | |
| | | genetic or protein manipulations. | |
| | | Altered survival characteristics: | |
| | | survival of industrial processes, | |
| | | growth or storage in product | |
| | | formats, persistence in gut | |
| | | environment. | |
| | | Altered metabolic properties. | |
| | | Altered probiotic attributes. | |
| | | Modified health properties | |
| | | (including immunoregulatory, | |
| | | anticancer, gut health). | |
| | | Modified antibiotic resistance. | |
| | | Improved antimicrobial | |
| | | properties. | |
| | | Regulation of polysaccharide | |
| | | production, adhesion, immune | |
| | | modulation. | |
| 55 | 147 | Altered amino acid metabolism. | Homologue of BH3554, encoding a |
| | | Removal of undesirable flavor | carboxylesterase (3.1.1.1). BH3554 |
| | | characteristics. | hydrolyzes carboxylic ester bonds |
| | | Production of desirable flavors. | with relatively broad substrate |
| | | Modified flavor, aroma and/or | specificity. It is involved in amino |
| | | texture attributes. | acid metabolism and flavor. The |
| | | Construction of genetic vectors | enzymatic degradation of amino acids |
| | | for controlled expression of RNA | in cheese plays a major role in cheese |
| | | and/or protein, fusion protein | flavor development. Amino acid |
| | | production, genetic modification, | degradation products greatly |
| | | mutagenesis amplification of | contribute to flavor or to off-flavors |
| | | genetic material or for other | (Rijnen et al., Appl. Environ. |
| | | genetic or protein manipulations. | Microbiol. 65: 4873-4880, 1999). |
| | | Altered survival characteristics: | |
| | | survival of industrial processes, | |
| | | growth or storage in product | |
| | | formats, persistence in gut | |
| | | environment. | |
| | | Altered metabolic properties. | |
| | | Altered probiotic attributes. | |
| | | Modified health properties | |
| | | (including immunoregulatory, | |
| | | anticancer, gut health). | |
| | | Modified antibiotic resistance. | |
| | | Improved fermentation properties | |
| | | or other industrially useful | |
| | | processes. | |
| 56 | 148 | Altered amino acid metabolism. | Homologue of Amd1, encoding an |
| | | Removal of undesirable flavor | aminoacylase (EC 3.5.1.14). Amd1 |
| | | characteristics. | deacetylates acylated amino acids. It |
| | | Production of desirable flavors. | plays a role in the production of |
| | | Modified flavor, aroma and/or | important flavor determinants. The |
| | | texture attributes. | enzymatic degradation of amino acids |
| | | Construction of genetic vectors | in cheese plays a major role in cheese |
| | | for controlled expression of RNA | flavor development. Amino acid |
| | | and/or protein, fusion protein | degradation products greatly |
| | | production, genetic modification, | contribute to flavor or to off-flavors |
| | | mutagenesis amplification of | (Rijnen et al., Appl. Environ. |
| | | genetic material or for other | Microbiol. 65: 4873-4880, 1999). |
| | | genetic or protein manipulations. | |
| | | Altered survival characteristics: | |
| | | survival of industrial processes, | |
| | | growth or storage in product | |
| | | formats, persistence in gut | |
| | | environment. | |
| | | Altered metabolic properties. | |
| | | Altered probiotic attributes. | |
| | | Modified health properties | |
| | | (including immunoregulatory, | |
| | | anticancer, gut health). | |
| | | Modified antibiotic resistance. | |
| | | Improved fermentation properties | |
| | | or other industrially useful | |
| | | processes. | |
| 57 | 149 | Altered cell wall or cell surface | Homologue of tmpA, encoding a |
| | | characteristics, structures or | putative transmembrane protein. |
| | | functions. | TmpA plays a role in adhesion and is |
| | | Modified adhesion to human or | part of an operon containing the |
| | | animal cells or cell lines. | mapA gene. |
| | | Production of desirable flavors. | |
| | | Modified flavor, aroma and/or | |
| | | texture attributes. | |
| | | Construction of genetic vectors | |
| | | for controlled expression of RNA | |
| | | and/or protein, fusion protein | |
| | | production, genetic modification, | |
| | | mutagenesis amplification of | |
| | | genetic material or for other | |
| | | genetic or protein manipulations. | |
| | | Altered survival characteristics: | |
| | | survival of industrial processes, | |
| | | growth or storage in product | |
| | | formats, persistence in gut | |
| | | environment. | |
| | | Altered metabolic properties. | |
| | | Altered probiotic attributes. | |
| | | Modified health properties | |
| | | including immunoregulatory, | |
| | | anticancer, gut health). | |
| | | Modified antibiotic resistance. | |
| | | Improved fermentation properties | |
| | | or other industrially useful | |
| | | processes. | |
| 58 | 150 | Construction of genetic vectors | Homologue of npr, encoding a |
| | | for controlled expression of RNA | NADH peroxidase (EC 1.11.1.1). Npr |
| | | and/or protein, fusion protein | utilizes hydrogen peroxide to create |
| | | production, genetic modification, | water and nicotinamide adenine |
| | | mutagenesis amplification of | dinucleotide (NADH) from its |
| | | genetic material or for other | oxidized form (NAD). Metabolism of |
| | | genetic or protein manipulations. | co-factors such as NADH can greatly |
| | | Production of desirable flavors. | influence the speed and type of |
| | | Modified flavor, aroma and/or | metabolic pathway utilized under |
| | | texture attributes. | different redox conditions, and can |
| | | Altered survival characteristics: | therefore influence flavor and/or |
| | | survival of industrial processes, | functionality. |
| | | growth or storage in product | |
| | | formats, persistence in gut | |
| | | environment. | |
| | | Altered viability in response to | |
| | | stress conditions. | |
| | | Altered metabolic properties or | |
| | | regulation of metabolic | |
| | | pathways. | |
| | | Altered probiotic attributes. | |
| | | Improved fermentation properties | |
| | | or other industrially useful | |
| | | processes. | |
| 59, 60 | 151, 152 | Altered amino acid metabolism. | Homologue of nifS. NifS is involved |
| | | Removal of undesirable flavor | in cysteine metabolism and |
| | | characteristics. | development of flavor compounds. |
| | | Production of desirable flavors. | The enzymatic degradation of amino |
| | | Modified flavor, aroma and/or | acids in cheese plays a major role in |
| | | texture attributes. | cheese flavor development. Amino |
| | | Construction of genetic vectors | acid degradation products greatly |
| | | for controlled expression of RNA | contribute to flavor or to off-flavors |
| | | and/or protein, fusion protein | (Rijnen et al., Appl. Environ. |
| | | production, genetic modification, | Microbiol. 65: 4873-4880, 1999). |
| | | mutagenesis amplification of | |
| | | genetic material or for other | |
| | | genetic or protein manipulations. | |
| | | Altered survival characteristics: | |
| | | survival of industrial processes, | |
| | | growth or storage in product | |
| | | formats, persistence in gut | |
| | | environment. | |
| | | Altered metabolic properties. | |
| | | Altered probiotic attributes. | |
| | | Modified health properties | |
| | | (including immunoregulatory, | |
| | | anticancer, gut health). | |
| | | Modified antibiotic resistance. | |
| | | Improved fermentation properties | |
| | | or other industrially useful | |
| | | processes. | |
| 61 | 153 | Production of desirable flavors. | Homologue of fabA, encoding a 3- |
| | | Modified flavor, aroma and/or | hydroxydecanoyl-ACP dehydratase. |
| | | texture attributes. | FabA introduces cis unsaturation into |
| | | Construction of genetic vectors | fatty acids during saturated fatty acid |
| | | for controlled expression of RNA | biosynthesis. The dehydratase |
| | | and/or protein, fusion protein | belongs to the thioester dehydratase |
| | | production, genetic modification, | family. Free fatty acids are important |
| | | mutagenesis amplification of | in providing flavor-bearing |
| | | genetic material or for other | compounds for dairy products such as |
| | | genetic or protein manipulations. | cheese, and have a significant role in |
| | | Altered survival characteristics: | both flavor and texture. Used |
| | | survival of industrial processes, | extensively in wide range of |
| | | growth or storage in product | convenience foods. Short chain fatty |
| | | formats, persistence in gut | acids are known to have a variety of |
| | | environment. | health impacts. |
| | | Altered metabolic properties. | |
| | | Modified lipid, glycolipid or free | |
| | | fatty acid levels or functional | |
| | | properties. | |
| | | Modified production of short | |
| | | chain fatty acids. | |
| | | Altered lipid metabolism. | |
| | | Altered probiotic attributes. | |
| | | Organisms or materials with | |
| | | improved health properties | |
| | | (including immunoregulatory, | |
| | | anticancer, gut health) | |
| 62 | 154 | Altered cell wall or cell surface | Homologue of aggH, encoding an |
| | | characteristics, structures or | autoaggregation mediating protein. |
| | | functions. | AggH contains a region of similarity |
| | | Modified adhesion to human or | to ATP-dependent DEAD-box |
| | | animal cells or cell lines. | helicase. The protein is involved in |
| | | Production of desirable flavors. | genetic exchange, pathogen exclusion |
| | | Modified flavor, aroma and/or | and persistence in the gut |
| | | texture attributes. | environment by promoting |
| | | Construction of genetic vectors | aggregation between bacteria. |
| | | for controlled expression of RNA | |
| | | and/or protein, fusion protein | |
| | | production, genetic modification, | |
| | | mutagenesis amplification of | |
| | | genetic material or for other | |
| | | genetic or protein manipulations. | |
| | | Altered survival characteristics: | |
| | | survival of industrial processes, | |
| | | growth or storage in product | |
| | | formats, persistence in gut | |
| | | environment. | |
| | | Altered metabolic properties. | |
| | | Altered probiotic attributes. | |
| | | Modified health properties | |
| | | (including immunoregulatory, | |
| | | anticancer, gut health). | |
| | | Modified antibiotic resistance. | |
| | | Improved antimicrobial | |
| | | properties. | |
| | | Improved fermentation properties | |
| | | or other industrially useful | |
| | | processes. | |
| 63 | 155 | Production of desirable flavors. | Homologue of the iolH gene, |
| | | Modified flavor, aroma and/or | encoding a protein involved in the iol |
| | | texture attributes. | operon of the myo-inositol |
| | | Construction of genetic vectors | catabolism pathway. Myo--inositol is |
| | | for controlled expression of RNA | abundant in nature, especially in soil. |
| | | and/or protein, fusion protein | Various microorganisms are able to |
| | | production, genetic modification, | grow on myo-inositol as the sole |
| | | mutagenesis amplification of | carbon source. The expression of the |
| | | genetic material or for other | iol operon is under glucose repression |
| | | genetic or protein manipulations. | (Miwa and Fujita, J. Bacteriol. |
| | | Altered survival characteristics: | 183: 5877-5884, 2001) |
| | | survival of industrial processes, | |
| | | growth or storage in product | |
| | | formats, persistence in gut | |
| | | environment. | |
| | | Altered metabolic properties. | |
| | | Modified carbohydrate levels or | |
| | | functional properties. | |
| | | Altered cell wall or cell surface | |
| | | characteristics, structures or | |
| | | functions. | |
| | | Modified adhesion to human or | |
| | | animal cells or cell lines. | |
| | | Altered probiotic attributes. | |
| | | Organisms or materials with | |
| | | improved health properties | |
| | | (including immunoregulatory, | |
| | | anticancer, gut health). | |
| 63 | 156 | Production of desirable flavors. | Homologue of the iolL gene, |
| | | Modified flavor, aroma and/or | encoding a protein involved in the iol |
| | | texture attributes. | operon of the myo-inositol |
| | | Construction of genetic vectors | catabolism pathway. Myo--nositol is |
| | | for controlled expression of RNA | abundant in nature, especially in soil. |
| | | and/or protein, fusion protein | Various microorganisms are able to |
| | | production, genetic modification, | grow on myo-inositol as the sole |
| | | mutagenesis amplification of | carbon source. The expression of the |
| | | genetic material or for other | iol operon is under glucose repression |
| | | genetic or protein manipulations. | (Miwa and Fujita, J. Bacteriol. |
| | | Altered survival characteristics: | 183: 5877-5884, 2001) |
| | | survival of industrial processes, | |
| | | growth or storage in product | |
| | | formats, persistence in gut | |
| | | environment. | |
| | | Altered metabolic properties. | |
| | | Modified carbohydrate levels or | |
| | | functional properties. | |
| | | Altered cell wall or cell surface | |
| | | characteristics, structures or | |
| | | functions. | |
| | | Modified adhesion to human or | |
| | | animal cells or cell lines. | |
| | | Altered probiotic attributes. | |
| | | Organisms or materials with | |
| | | improved health properties | |
| | | (including immunoregulatory, | |
| | | anticancer, gut health). | |
| 64 | 157 | Removal of undesirable flavor | Homologue of citX, encoding apo- |
| | | characteristics. | citrate lyase phosphoribosyl- |
| | | Modified flavor, aroma, texture | dephospho-CoA transferase (Apo- |
| | | attributes. | ACP nucleodityltransferase; EC |
| | | Construction of genetic vectors | 2.8.3.10). The transferase belongs to |
| | | for controlled expression of RNA | the citX family (Schneider et al., |
| | | and/or protein, fusion protein | Biochem. 39: 9438-9450, 2000). |
| | | production, genetic modification, | Carbohydrate metabolism impacts on |
| | | mutagenesis amplification of | flavor, functionality and survival as |
| | | genetic material or for other | well as growth. |
| | | genetic or protein manipulations. | |
| | | Altered survival characteristics: | |
| | | (survival of industrial processes, | |
| | | growth or storage in product | |
| | | formats, persistence in gut | |
| | | environment). | |
| | | Modified carbohydrate levels or | |
| | | functional properties. | |
| | | Altered metabolic properties. | |
| | | Modified citrate metabolism. | |
| | | Altered probiotic attributes. | |
| | | Organisms or materials with | |
| | | improved health properties | |
| | | (including immunoregulatory, | |
| | | anticancer, gut health). | |
| | | Improved fermentation properties | |
| | | or other industrially useful | |
| | | processes. | |
| 64 | 158 | Removal of undesirable flavor | Homologue of pycB, encoding |
| | | characteristics. | pyruvate carboxylase, which |
| | | Modified flavor, aroma, texture | catalyzes a two-step reaction, |
| | | attributes. | involving the ATP-dependent |
| | | Construction of genetic vectors | carboxylation of the covalently |
| | | for controlled expression of RNA | attached biotin in the first step and |
| | | and/or protein, fusion protein | the transfer of the carboxyl group to |
| | | production, genetic modification, | pyruvate to generate oxaloacetate in |
| | | mutagenesis amplification of | the second. The enzyme is involved |
| | | genetic material or for other | in gluconeogenesis and amino acid |
| | | genetic or protein manipulations. | biotransformations. Carbohydrate |
| | | Altered survival characteristics: | metabolism impacts on flavor, |
| | | (survival of industrial processes, | functionality and survival as well as |
| | | growth or storage in product | growth. |
| | | formats, persistence in gut | |
| | | environment). | |
| | | Modified carbohydrate levels or | |
| | | functional properties. | |
| | | Altered metabolic properties. | |
| | | Altered probiotic attributes. | |
| | | Organisms or materials with | |
| | | improved health properties | |
| | | (including immunoregulatory, | |
| | | anticancer, gut health) | |
| | | Improved fermentation properties | |
| | | or other industrially useful | |
| | | processes. | |
| 66 | 160 | Production of desirable flavors. | Homologue of fox3, encoding a 3- |
| | | Modified flavor, aroma and/or | oxoacyl-coenzyme A thiolase (EC |
| | | texture attributes. | 2.3.1.16) also called acetyl-CoA C- |
| | | Construction of genetic vectors | acyltransferase, which participates in |
| | | for controlled expression of RNA | the beta-oxidation of fatty acids. |
| | | and/or protein, fusion protein | Expression of the FOX3 gene can be |
| | | production, genetic modification, | induced by oleate and repressed by |
| | | mutagenesis amplification of | glucose (Einerhand et al., Mol. Cell. |
| | | genetic material or for other | Biol. 15: 3405-3414, 1995). Free fatty |
| | | genetic or protein manipulations. | acids are important in providing |
| | | Altered survival characteristics: | flavor-bearing compounds for dairy |
| | | survival of industrial processes, | products such as cheese, and have a |
| | | growth or storage in product | significant role in both flavor and |
| | | formats, persistence in gut | texture. Used extensively in wide |
| | | environment. | range of convenience foods. Short |
| | | Altered metabolic properties. | chain fatty acids are known to have a |
| | | Modified lipid, glycolipid or free | variety of health impacts. |
| | | fatty acid levels or functional | |
| | | properties. | |
| | | Modified production of short | |
| | | chain fatty acids. | |
| | | Altered lipid metabolism. | |
| | | Altered probiotic attributes. | |
| | | Organisms or materials with | |
| | | improved health properties | |
| | | (including immunoregulatory, | |
| | | anticancer, gut health). | |
| | | Improved fermentation properties | |
| | | or other industrially useful | |
| | | processes. | |
| 67 | 161 | Construction of genetic vectors | Homologue of YchH, encoding an |
| | | for controlled expression of RNA | acetyltransferase. Transfer of acetyl |
| | | and/or protein, fusion protein | groups are important in regulation of |
| | | production, genetic modification, | metabolic pathways was well as co- |
| | | mutagenesis amplification of | factor production and can influence |
| | | genetic material or for other | flavor and/or functionality. |
| | | genetic or protein manipulations. | |
| | | Production of desirable flavors. | |
| | | Modified flavor, aroma and/or | |
| | | texture attributes. | |
| | | Altered survival characteristics: | |
| | | survival of industrial processes, | |
| | | growth or storage in product | |
| | | formats, persistence in gut | |
| | | environment. | |
| | | Altered viability in response to | |
| | | stress conditions. | |
| | | Altered metabolic properties or | |
| | | regulation of metabolic | |
| | | pathways. | |
| | | Altered probiotic attributes. | |
| 68 | 162 | Production of desirable flavors. | Homologue of SC6F7, encoding a |
| | | Modified flavor, aroma and/or | lipase. Lipases are involved in the |
| | | texture attributes. | breakdown of triglycerides, |
| | | Construction of genetic vectors | metabolism, growth, production of |
| | | for controlled expression of RNA | flavor compounds, and the release of |
| | | and/or protein, fusion protein | free fatty acids. Can also catalyze |
| | | production, genetic modification, | esterification of glycerol to form |
| | | mutagenesis amplification of | mono, di- and triglycerides. Free fatty |
| | | genetic material or for other | acids are important in providing |
| | | genetic or protein manipulations. | flavor-bearing compounds for dairy |
| | | Altered survival characteristics: | products such as cheese, and have a |
| | | survival of industrial processes, | significant role in both flavor and |
| | | growth or storage in product | texture. Used extensively in wide |
| | | formats, persistence in gut | range of convenience foods. Short |
| | | environment. | chain fatty acids are known to have a |
| | | Altered metabolic properties. | variety of health impacts. |
| | | Modified lipid, glycolipid or free | |
| | | fatty acid levels or functional | |
| | | properties. | |
| | | Modified production of short | |
| | | chain fatty acids. | |
| | | Altered lipid metabolism. | |
| | | Altered probiotic attributes. | |
| | | Organisms or materials with | |
| | | improved health properties | |
| | | (including immunoregulatory, | |
| | | anticancer, gut health). | |
| | | Improved fermentation properties | |
| | | or other industrially useful | |
| | | processes. | |
| 69 | 163 | Altered cell wall or cell surface | Homologue of yohH, a |
| | | characteristics, structures or | lipopolysaccharide synthesis protein. |
| | | functions. | YohH is involved in techoic acid |
| | | Modified adhesion to human or | synthesis, and important for cell wall |
| | | animal cells or cell lines. | functions including adhesion, |
| | | Production of desirable flavors. | immune cell interaction, product |
| | | Modified flavor, aroma and/or | texture. |
| | | texture attributes. | |
| | | Construction of genetic vectors | |
| | | for controlled expression of RNA | |
| | | and/or protein, fusion protein | |
| | | production, genetic modification, | |
| | | mutagenesis amplification of | |
| | | genetic material or for other | |
| | | genetic or protein manipulations. | |
| | | Altered survival characteristics: | |
| | | survival of industrial processes, | |
| | | growth or storage in product | |
| | | formats, persistence in gut | |
| | | environment. | |
| | | Altered metabolic properties. | |
| | | Altered probiotic attributes. | |
| | | Modified health properties | |
| | | (including immunoregulatory, | |
| | | anticancer, gut health). | |
| | | Modified antibiotic resistance. | |
| | | Improved antimicrobial | |
| | | properties. | |
| | | Improved fermentation properties | |
| | | or other industrially useful | |
| | | processes. | |
| 69 | 164 | Altered cell wall or cell surface | Homologue of yohJ, encoding a |
| | | characteristics, structures or | lipopolysaccharide biosynthesis |
| | | functions. | protein. YohJ is involved in techoic |
| | | Modified adhesion to human or | acid synthesis, and important for cell |
| | | animal cells or cell lines. | wall functions including adhesion, |
| | | Production of desirable flavors. | immune cell interaction and product |
| | | Modified flavor, aroma and/or | texture. |
| | | texture attributes. | |
| | | Construction of genetic vectors | |
| | | for controlled expression of RNA | |
| | | and/or protein, fusion protein | |
| | | production, genetic modification, | |
| | | mutagenesis amplification of | |
| | | genetic material or for other | |
| | | genetic or protein manipulations. | |
| | | Altered survival characteristics: | |
| | | survival of industrial processes, | |
| | | growth or storage in product | |
| | | formats, persistence in gut | |
| | | environment. | |
| | | Altered metabolic properties. | |
| | | Altered probiotic attributes. | |
| | | Modified health properties | |
| | | (including immunoregulatory, | |
| | | anticancer, gut health). | |
| | | Modified antibiotic resistance. | |
| | | Improved antimicrobial | |
| | | properties. | |
| | | Improved fermentation properties | |
| | | or other industrially useful | |
| | | processes. | |
| 70 | 165 | Construction of genetic vectors | Homologue of pstS, encoding a |
| | | for controlled expression of RNA | phosphate-binding protein that is part |
| | | and/or protein, fusion protein | of the phosphate specific transporter |
| | | production, genetic modification, | (Pst) in bacteria. Pst is a multisubunit |
| | | mutagenesis amplification of | system and belongs to the ABC |
| | | genetic material or for other | superfamily of transporters (Novak et |
| | | genetic or protein manipulations. | al., J Bacteriol. 181: 1126-1133, |
| | | Production of desirable flavors. | 1999). Intracellular phosphate levels |
| | | Modified flavor, aroma and/or | influence survival of bacteria in |
| | | texture attributes. | environmental stress conditions, and |
| | | Altered survival characteristics: | are involved in the stringent response. |
| | | survival of industrial processes, | |
| | | growth or storage in product | |
| | | formats, persistence in gut | |
| | | environment. | |
| | | Altered viability in response to | |
| | | stress conditions. | |
| | | Altered metabolic properties or | |
| | | regulation of metabolic | |
| | | pathways. | |
| | | Altered probiotic attributes. | |
| 71 | 166 | Altered cell wall or cell surface | Homologue of oppA, encoding an |
| | | characteristics, structures or | integral membrane protein of the |
| | | functions. | oligopeptide transport system (Opp) |
| | | Production of bioactive or | of Lactococcus lactis. Opp proteins |
| | | functional polypeptides. | and the proteinase PrtP are important |
| | | Modified adhesion to human or | components of the proteolytic system. |
| | | animal cells or cell lines. | The Opp system belongs to the |
| | | Altered amino acid metabolism. | superfamily of ABC transporters and |
| | | Removal of undesirable flavor | consists of five proteins: the integral |
| | | characteristics. | membrane proteins OppB and OppC, |
| | | Production of desirable flavors. | the ATP-binding proteins OppD and |
| | | Modified flavor, aroma and/or | OppF, and the OppA a receptor |
| | | texture attributes. | protein (Detmers et al., Proc. Natl. |
| | | Construction of genetic vectors | Acad. Sci. USA 97: 12487-12492, |
| | | for controlled expression of RNA | 2000). Important for the uptake and |
| | | and/or protein, fusion protein | supply of amino acids to bacteria, and |
| | | production, genetic modification, | the resultant production of flavorful |
| | | mutagenesis amplification of | or functional amino-acid degradation |
| | | genetic material or for other | products. |
| | | genetic or protein manipulations. | |
| | | Altered survival characteristics: | |
| | | survival of industrial processes, | |
| | | growth or storage in product | |
| | | formats, persistence in gut | |
| | | environment. | |
| | | Altered metabolic properties. | |
| | | Altered probiotic attributes. | |
| | | Modified health properties | |
| | | (including immunoregulatory, | |
| | | anticancer, gut health). | |
| | | Improved fermentation properties | |
| | | or other industrially useful | |
| | | processes. | |
| 71 | 167 | Altered cell wall or cell surface | Homologue of oppB, encoding an |
| | | characteristics, structures or | integral membrane protein of the |
| | | functions. | oligopeptide transport system (Opp) |
| | | Production of bioactive or | of Lactococcus lactis. Opp proteins |
| | | functional polypeptides. | and the proteinase PrtP are important |
| | | Modified adhesion to human or | components of the proteolytic system. |
| | | animal cells or cell lines. | The Opp system belongs to the |
| | | Altered amino acid metabolism. | superfamily of ABC transporters and |
| | | Removal of undesirable flavor | consists of five proteins: the integral |
| | | characteristics. | membrane proteins OppB and OppC, |
| | | Production of desirable flavors. | the ATP-binding proteins OppD and |
| | | Modified flavor, aroma and/or | OppF, and the OppA a receptor |
| | | texture attributes. | protein (Detmers et al., Proc. Natl. |
| | | Construction of genetic vectors | Acad. Sci. USA 97: 12487-12492, |
| | | for controlled expression of RNA | 2000). Important for the uptake and |
| | | and/or protein, fusion protein | supply of amino acids to bacteria, and |
| | | production, genetic modification, | the resultant production of flavorful |
| | | mutagenesis amplification of | or functional amino-acid degradation |
| | | genetic material or for other | products. |
| | | genetic or protein manipulations. | |
| | | Altered survival characteristics: | |
| | | survival of industrial processes, | |
| | | growth or storage in product | |
| | | formats, persistence in gut | |
| | | environment. | |
| | | Altered metabolic properties. | |
| | | Altered probiotic attributes. | |
| | | Modified health properties | |
| | | (including immunoregulatory, | |
| | | anticancer, gut health). | |
| | | Improved fermentation properties | |
| | | or other industrially useful | |
| | | processes. | |
| 71 | 168 | Altered cell wall or cell surface | Homologue of OppC, encoding an |
| | | characteristics, structures or | integral membrane protein of the |
| | | functions. | oligopeptide transport system (Opp) |
| | | Production of bioactive or | of Lactococcus lactis. Opp proteins |
| | | functional polypeptides. | and the proteinase PrtP are important |
| | | Modified adhesion to human or | components of the proteolytic system. |
| | | animal cells or cell lines. | The Opp system belongs to the |
| | | Altered amino acid metabolism. | superfamily of ABC transporters and |
| | | Removal of undesirable flavor | consists of five proteins: the integral |
| | | characteristics. | membrane proteins OppB and OppC, |
| | | Production of desirable flavors. | the ATP-binding proteins OppD and |
| | | Modified flavor, aroma and/or | OppF, and the OppA a receptor |
| | | texture attributes. | protein (Detmers et al., Proc. Natl. |
| | | Construction of genetic vectors | Acad. Sci. USA 97: 12487-12492, |
| | | for controlled expression of RNA | 2000). Important for the uptake and |
| | | and/or protein, fusion protein | supply of amino acids to bacteria, and |
| | | production, genetic modification, | the resultant production of flavorful |
| | | mutagenesis amplification of | or functional amino-acid degradation |
| | | genetic material or for other | products. |
| | | genetic or protein manipulations. | |
| | | Altered survival characteristics: | |
| | | survival of industrial processes, | |
| | | growth or storage in product | |
| | | formats, persistence in gut | |
| | | environment. | |
| | | Altered metabolic properties. | |
| | | Altered probiotic attributes. | |
| | | Modified health properties | |
| | | (including immunoregulatory, | |
| | | anticancer, gut health). | |
| | | Improved fermentation properties | |
| | | or other industrially useful | |
| | | processes. | |
| 71 | 169 | Altered cell wall or cell surface | Homologue of OppF, encoding an |
| | | characteristics, structures or | integral membrane protein of the |
| | | functions. | oligopeptide transport system (Opp) |
| | | Production of bioactive or | of Lactococcus lactis. Opp proteins |
| | | functional polypeptides. | and the proteinase PrtP are important |
| | | Modified adhesion to human or | components of the proteolytic system. |
| | | animal cells or cell lines. | The Opp system belongs to the |
| | | Altered amino acid metabolism. | superfamily of ABC transporters and |
| | | Removal of undesirable flavor | consists of five proteins: the integral |
| | | characteristics. | membrane proteins OppB and OppC, |
| | | Production of desirable flavors. | the ATP-binding proteins OppD and |
| | | Modified flavor, aroma and/or | OppF, and the OppA a receptor |
| | | texture attributes. | protein (Detmers et al., Proc. Natl. |
| | | Construction of genetic vectors | Acad. Sci. USA 97: 12487-12492, |
| | | for controlled expression of RNA | 2000). Important for the uptake and |
| | | and/or protein, fusion protein | supply of amino acids to bacteria, and |
| | | production, genetic modification, | the resultant production of flavorful |
| | | mutagenesis amplification of | or functional amino-acid degradation |
| | | genetic material or for other | products. |
| | | genetic or protein manipulations. | |
| | | Altered survival characteristics: | |
| | | survival of industrial processes, | |
| | | growth or storage in product | |
| | | formats, persistence in gut | |
| | | environment. | |
| | | Altered metabolic properties. | |
| | | Altered probiotic attributes. | |
| | | Modified health properties | |
| | | (including immunoregulatory, | |
| | | anticancer, gut health). | |
| | | Improved fermentation properties | |
| | | or other industrially useful | |
| | | processes. | |
| 72 | 170 | Removal of undesirable flavor | Homologue of thdF, which is |
| | | characteristics. | involved in the oxidation of |
| | | Modified flavor, aroma, texture | derivatives of the sulphur-containing |
| | | attributes. | heterocycle thiophene and is induced |
| | | Construction of genetic vectors | during stationary phase. The thdF |
| | | for controlled expression of RNA | gene is subject to substantial |
| | | and/or protein, fusion protein | catabolite repression by glucose and |
| | | production, genetic modification, | its expression is also greatly |
| | | mutagenesis amplification of | decreased in the absence of oxygen |
| | | genetic material or for other | (Zabel et al., Microbios. 101: 89-103, |
| | | genetic or protein manipulations. | 2000). |
| | | Altered survival characteristics: | |
| | | (survival of industrial processes, | |
| | | growth or storage in product | |
| | | formats, persistence in gut | |
| | | environment). | |
| | | Altered metabolic properties. | |
| | | Modified metabolism of sulphur- | |
| | | containing compounds. | |
| | | Altered probiotic attributes. | |
| | | Organisms or materials with | |
| | | improved health properties | |
| | | (including immunoregulatory, | |
| | | anticancer, gut health). | |
| 72 | 171 | Construction of genetic vectors | Homologue of gidA, encoding a |
| | | for controlled expression of RNA | glucose-inhibited division protein A, |
| | | and/or protein, fusion protein | which is involved in cell division and |
| | | production, genetic modification, | in moderating translational fidelity |
| | | mutagenesis amplification of | (Kinscherf and Willis, J. Bacteriol. |
| | | genetic material or for other | 184: 2281-2286, 2002). Affects |
| | | genetic or protein manipulations. | growth and viability in different |
| | | Production of desirable flavors. | growth environments. |
| | | Modified flavor, aroma and/or | |
| | | texture attributes. | |
| | | Altered survival characteristics: | |
| | | survival of industrial processes, | |
| | | growth or storage in product | |
| | | formats, persistence in gut | |
| | | environment. | |
| | | Altered viability in response to | |
| | | stress conditions. | |
| | | Altered metabolic properties or | |
| | | regulation of metabolic | |
| | | pathways. | |
| | | Altered probiotic attributes. | |
| 73 | 172 | Construction of genetic vectors | Homologue of poxB, encoding a |
| | | for controlled expression of RNA | pyruvate oxidase (EC 1.2.3.3), which |
| | | and/or protein, fusion protein | decarboxylates pyruvate. The enzyme |
| | | production, genetic modification, | is a flavoprotein (FAD) requiring |
| | | mutagenesis amplification of | thiamine diphosphate and is |
| | | genetic material or for other | important for aerobic growth and |
| | | genetic or protein manipulations. | survival in aerobic conditions. |
| | | Production of desirable flavors. | Carbohydrate metabolism impacts on |
| | | Modified flavor, aroma and/or | flavor, functionality and survival as |
| | | texture attributes. | well as growth. |
| | | Altered survival characteristics: | |
| | | survival of industrial processes, | |
| | | growth or storage in product | |
| | | formats, persistence in gut | |
| | | environment. | |
| | | Altered viability in response to | |
| | | stress conditions. | |
| | | Altered metabolic properties or | |
| | | regulation of metabolic | |
| | | pathways. | |
| | | Altered probiotic attributes. | |
| 74 | 173 | Altered amino acid metabolism. | Homologue of gltD, encoding a |
| | | Removal of undesirable flavor | glutamate synthase (EC 1.4.1.13), |
| | | characteristics. | which catalyzes the reductive transfer |
| | | Production of desirable flavors. | of the amide group of glutamine to |
| | | Modified flavor, aroma and/or | the keto position of 2-oxoglutarate to |
| | | texture attributes. | yield two molecules of glutamate. |
| | | Construction of genetic vectors | The resulting glutamine and |
| | | for controlled expression of RNA | glutamate serve as nitrogen donors in |
| | | and/or protein, fusion protein | the biosynthesis of various nitrogen- |
| | | production, genetic modification, | containing compounds. This pathway |
| | | mutagenesis amplification of | is involved in the integration of |
| | | genetic material or for other | carbon and nitrogen assimilations. |
| | | genetic or protein manipulations. | Amino acid degradation products |
| | | Altered survival characteristics: | greatly contribute to flavor or to off- |
| | | survival of industrial processes, | flavors (Rijnen et al., Appl. Environ. |
| | | growth or storage in product | Microbiol. 65: 4873-4880, 1999). |
| | | formats, persistence in gut | |
| | | environment. | |
| | | Altered metabolic properties. | |
| | | Altered probiotic attributes. | |
| | | Modified health properties | |
| | | (including immunoregulatory, | |
| | | anticancer, gut health). | |
| | | Modified antibiotic resistance. | |
| 75 | 174 | Altered amino acid metabolism. | Homologue of dhfR, encoding a |
| | | Removal of undesirable flavor | dihydrofolate reductase (EC 1.5.1.3), |
| | | characteristics. | which catalyzes the essential step for |
| | | Production of desirable flavors. | de novo glycine and purine synthesis, |
| | | Modified flavor, aroma and/or | DNA precursor synthesis, and for the |
| | | texture attributes. | conversion of dUMP to dTMP. |
| | | Construction of genetic vectors | Involved in folate production, which |
| | | for controlled expression of RNA | has major health impacts and also |
| | | and/or protein, fusion protein | detoxifies some chemotherapeutic |
| | | production, genetic modification, | drugs and other cytotoxic |
| | | mutagenesis amplification of | compounds. |
| | | genetic material or for other | |
| | | genetic or protein manipulations. | |
| | | Altered survival characteristics: | |
| | | survival of industrial processes, | |
| | | growth or storage in product | |
| | | formats, persistence in gut | |
| | | environment. | |
| | | Altered metabolic properties. | |
| | | Increased folate production. | |
| | | Altered probiotic attributes. | |
| | | Modified health properties | |
| | | (including immunoregulatory, | |
| | | anticancer, gut health). | |
| | | Protection of intestinal cells from | |
| | | toxic compounds. | |
| | | Modified antibiotic resistance. | |
| | | Improved fermentation properties | |
| | | or other industrially useful | |
| | | processes. | |
| 77 | 176 | Altered amino acid metabolism. | Homologue of trpA, encoding the |
| | | Removal of undesirable flavor | tryptophan synthase alpha chain (EC |
| | | characteristics. | 4.2.1.20). TrpA catalyzes the |
| | | Production of desirable flavors. | formation of indole from the cleavage |
| | | Modified flavor, aroma and/or | of 3-indolyl-D-glyceraldehyde 3′- |
| | | texture attributes. | phosphate. Seven structural genes are |
| | | Construction of genetic vectors | required for tryptophan biosynthesis: |
| | | for controlled expression of RNA | trpABCDEFG. TrpA encodes the |
| | | and/or protein, fusion protein | tryptophan synthase alpha chain (EC |
| | | production, genetic modification, | 4.2.1.20) Tryptophan is important for |
| | | mutagenesis amplification of | flavor development. Amino acid |
| | | genetic material or for other | degradation products greatly |
| | | genetic or protein manipulations. | contribute to flavor or to off-flavors |
| | | Altered survival characteristics: | (Rijnen et al., Appl. Environ. |
| | | survival of industrial processes, | Microbiol. 65: 4873-4880, 1999). |
| | | growth or storage in product | |
| | | formats, persistence in gut | |
| | | environment. | |
| | | Altered metabolic properties. | |
| | | Altered probiotic attributes. | |
| | | Modified health properties | |
| | | (including immunoregulatory, | |
| | | anticancer, gut health). | |
| | | Modified antibiotic resistance. | |
| 77 | 177 | Altered amino acid metabolism. | Homologue of trpB, encoding |
| | | Removal of undesirable flavor | tryptophan synthase beta chain (EC |
| | | characteristics. | 4.2.1.20). TrpB catalyzes the |
| | | Production of desirable flavors. | condensation of indole to a serine- |
| | | Modified flavor, aroma and/or | derived aminoacrylate moiety bound |
| | | texture attributes. | to pyridoxal phosphate. Seven |
| | | Construction of genetic vectors | structural genes are required for |
| | | for controlled expression of RNA | tryptophan biosynthesis: |
| | | and/or protein, fusion protein | trpABCDEFG. TrpB encodes the |
| | | production, genetic modification, | tryptophan synthase beta chain (EC |
| | | mutagenesis amplification of | 4.2.1.20). Tryptophan is important for |
| | | genetic material or for other | flavor development. Amino acid |
| | | genetic or protein manipulations. | degradation products greatly |
| | | Altered survival characteristics: | contribute to flavor or to off-flavors |
| | | survival of industrial processes, | (Rijnen et al., Appl. Environ. |
| | | growth or storage in product | Microbiol. 65: 4873-4880, 1999). |
| | | formats, persistence in gut | |
| | | environment. | |
| | | Altered metabolic properties. | |
| | | Altered probiotic attributes. | |
| | | Modified health properties | |
| | | (including immunoregulatory, | |
| | | anticancer, gut health). | |
| | | Modified antibiotic resistance. | |
| 77 | 178 | Altered amino acid metabolism. | Homologue of trpC, encoding the |
| | | Removal of undesirable flavor | bifunctional enzyme |
| | | characteristics. | phosphoribosylanthranilate isomerase |
| | | Production of desirable flavors. | (EC 5.3.1.24)-indoleglycerol |
| | | Modified flavor, aroma and/or | phosphate synthetase (EC 4.1.1.48). |
| | | texture attributes. | TrpC catalyzes the ring closure of 1- |
| | | Construction of genetic vectors | (2-carboxyphenylamino)-1- |
| | | for controlled expression of RNA | deoxyribulose 5′-phosphate to |
| | | and/or protein, fusion protein | indoleglycerol phosphate, the fifth |
| | | production, genetic modification, | step in the pathway of tryptophan |
| | | mutagenesis amplification of | biosynthesis from chorismate. Seven |
| | | genetic material or for other | structural genes are required for |
| | | genetic or protein manipulations. | tryptophan biosynthesis: |
| | | Altered survival characteristics: | trpABCDEFG. Tryptophan is |
| | | survival of industrial processes, | important for flavor development. |
| | | growth or storage in product | Amino acid degradation products |
| | | formats, persistence in gut | greatly contribute to flavor or to off- |
| | | environment. | flavors (Rijnen et al., Appl. Environ. |
| | | Altered metabolic properties. | Microbiol. 65: 4873-4880, 1999). |
| | | Altered probiotic attributes. | |
| | | Modified health properties | |
| | | (including immunoregulatory, | |
| | | anticancer, gut health). | |
| | | Modified antibiotic resistance. | |
| 77 | 179 | Altered amino acid metabolism. | Homologue of trpD, encoding |
| | | Removal of undesirable flavor | phosphoribosyl anthranilate |
| | | characteristics. | tranferase (EC 2.4.2.18),. TrpD |
| | | Production of desirable flavors. | catalyzes the reaction N-(5-phospho- |
| | | Modified flavor, aroma and/or | D-ribosyl)-anthranilate + diphosphate = anthranilate + 5- |
| | | texture attributes. | phospo-a-D- |
| | | Construction of genetic vectors | ribose 1-diphosphate. Seven |
| | | for controlled expression of RNA | structural genes are required for |
| | | and/or protein, fusion protein | tryptophan biosynthesis: |
| | | production, genetic modification, | trpABCDEFG. Tryptophan is |
| | | mutagenesis amplification of | important for flavor development. |
| | | genetic material or for other | Amino acid degradation products |
| | | genetic or protein manipulations. | greatly contribute to flavor or to off- |
| | | Altered survival characteristics: | flavors (Rijnen et al., Appl. Environ. |
| | | survival of industrial processes, | Microbiol. 65: 4873-4880, 1999). |
| | | growth or storage in product | |
| | | formats, persistence in gut | |
| | | environment. | |
| | | Altered metabolic properties. | |
| | | Altered probiotic attributes. | |
| | | Modified health properties | |
| | | (including immunoregulatory, | |
| | | anticancer, gut health). | |
| | | Modified antibiotic resistance. | |
| 77 | 180 | Altered amino acid metabolism. | Homologue of trpF, encoding |
| | | Removal of undesirable flavor | phosphoribosylanthranilate isomerase |
| | | characteristics. | (EC 5.3.1.24). TrpF catalyzes the |
| | | Production of desirable flavors. | conversion of N-(5′- |
| | | Modified flavor, aroma and/or | diphosphoribosyl)anthranilate to 1- |
| | | texture attributes. | (o-carboxyphenylamino)-1- |
| | | Construction of genetic vectors | deoxyribulose 5 phosphate. Seven |
| | | for controlled expression of RNA | structural genes are required for |
| | | and/or protein, fusion protein | tryptophan biosynthesis: |
| | | production, genetic modification, | trpABCDEFG. Tryptophan is |
| | | mutagenesis amplification of | important for flavor development. |
| | | genetic material or for other | Amino acid degradation products |
| | | genetic or protein manipulations. | greatly contribute to flavor or to off- |
| | | Altered survival characteristics: | flavors (Rijnen et al., Appl. Environ. |
| | | survival of industrial processes, | Microbiol. 65: 4873-4880, 1999). |
| | | growth or storage in product | |
| | | formats, persistence in gut | |
| | | environment. | |
| | | Altered metabolic properties. | |
| | | Altered probiotic attributes. | |
| | | Modified health properties | |
| | | (including immunoregulatory, | |
| | | anticancer, gut health). | |
| | | Modified antibiotic resistance. | |
| 78 | 181 | Construction of genetic vectors | Homologue of purine nucleoside |
| | | for controlled expression of RNA | phosphorylase (PNP) (EC 2.4.2.1). |
| | | and/or protein, fusion protein | PNP catalyzes the reversible |
| | | production, genetic modification, | phosphorolysis of (2′-deoxy)purine |
| | | mutagenesis amplification of | ribonucleosides to free base and (2′- |
| | | genetic material or for other | deoxy)ribose-1-phosphate and has a |
| | | genetic or protein manipulations. | metabolic role in purine salvage. |
| | | Production of desirable flavors. | Intracellular phosphate levels |
| | | Modified flavor, aroma and/or | influence survival of bacteria in |
| | | texture attributes. | environmental stress conditions, and |
| | | Altered survival characteristics: | are involved in the stringent response. |
| | | survival of industrial processes, | |
| | | growth or storage in product | |
| | | formats, persistence in gut | |
| | | environment. | |
| | | Altered viability in response to | |
| | | stress conditions. | |
| | | Altered metabolic properties or | |
| | | regulation of metabolic | |
| | | pathways. | |
| | | Altered probiotic attributes. | |
| 79 | 182 | Construction of genetic vectors | Homologue to relA. RelA plays a role |
| | | for controlled expression of RNA | in synthesis and degradation of the |
| | | and/or protein, fusion protein | highly phosphorylated guanosine |
| | | production, genetic modification, | nucleotides (p)ppGp. Intracellular |
| | | mutagenesis amplification of | phosphate levels influence survival of |
| | | genetic material or for other | bacteria in environmental stress |
| | | genetic or protein manipulations. | conditions, and are involved in the |
| | | Production of desirable flavors. | stringent response. |
| | | Modified flavor, aroma and/or | |
| | | texture attributes. | |
| | | Altered survival characteristics: | |
| | | survival of industrial processes, | |
| | | growth or storage in product | |
| | | formats, persistence in gut | |
| | | environment. | |
| | | Altered viability in response to | |
| | | stress conditions. | |
| | | Altered metabolic properties or | |
| | | regulation of metabolic | |
| | | pathways. | |
| | | Altered probiotic attributes. | |
| 80 | 183 | Altered cell wall or cell surface | Homologue of lysostaphin, an |
| | | characteristics, structures or | antimicrobial immunity factor of |
| | | functions. | Staphylococcus simulans biovar |
| | | Improved antimicrobial | staphylolyticus active against |
| | | properties | Staphylococcus aureas. Lysostaphin |
| | | Modified adhesion to human or | is currently being investigated for use |
| | | animal cells or cell lines. | against mastitis in dairy cattle, caused |
| | | Production of desirable flavors. | by Staphylococcus aureus (Kerr et |
| | | Modified flavor, aroma and/or | al., Nat. Biotechnol. 19: 66-70, 2001). |
| | | texture attributes. | The gene contains the conserved |
| | | Construction of genetic vectors | motif GPHLHF, which is also present |
| | | for controlled expression of RNA | in several secreted peptidases. |
| | | and/or protein, fusion protein | Lysostaphin has utility as an |
| | | production, genetic modification, | antimicrobial for human and |
| | | mutagenesis amplification of | veterinary use. |
| | | genetic material or for other | |
| | | genetic or protein manipulations. | |
| | | Altered survival characteristics: | |
| | | survival of industrial processes, | |
| | | growth or storage in product | |
| | | formats, persistence in gut | |
| | | environment. | |
| | | Altered metabolic properties. | |
| | | Altered probiotic attributes. | |
| | | Modified health properties | |
| | | (including immunoregulatory, | |
| | | anticancer, gut health). | |
| | | Modified antibiotic resistance. | |
| | | Improved fermentation properties | |
| | | or other industrially useful | |
| | | processes. | |

[0054] Isolated polynucleotides of the present invention include the polynucleotides identified herein as SEQ ID NOS: 1-80; isolated polynucleotides comprising a polynucleotide sequence selected from the group consisting of SEQ ID NOS: 1-80; isolated polynucleotides comprising at least a specified number of contiguous residues (x-mers) of any of the polynucleotides identified as SEQ ID NOS: 1-80; isolated polynucleotides comprising a polynucleotide sequence that is complementary to any of the above polynucleotides; isolated polynucleotides comprising a polynucleotide sequence that is a reverse sequence or a reverse complement of any of the above polynucleotides; antisense sequences corresponding to any of the above polynucleotides; and variants of any of the above polynucleotides, as that term is described in this specification.

[0055] The word “polynucleotide(s),” as used herein, means a single or double stranded polymer of deoxyribonucleotide or ribonucleotide bases and includes DNA and corresponding RNA molecules, including mRNA molecules, both sense and antisense strands of DNA and RNA molecules, and comprehends cDNA, genomic DNA and recombinant DNA, as well as wholly or partially synthesized polynucleotides. A polynucleotide of the present invention may be an entire gene, or any portion thereof. A gene is a DNA sequence which codes for a functional protein or RNA molecule. Operable antisense polynucleotides may comprise a fragment of the corresponding polynucleotide, and the definition of “polynucleotide” therefore includes all operable antisense fragments. Antisense polynucleotides and techniques involving antisense polynucleotides are well known in the art and are described, for example, in Robinson-Benion, et al., “Antisense techniques,” Methods in Enzymol. 254(23): 363-375, 1995; and Kawasaki, et al., Artific. Organs 20 (8): 836-848, 1996.

[0056] The definitions of the terms “complement,” “reverse complement,” and “reverse sequence,” as used herein, are best illustrated by the following examples. For the sequence 5′ AGGACC 3′, the complement, reverse complement, and reverse sequences are as follows:

| | |
|---|---|
| complement | 3′ TCCTGG 5′ |
| reverse complement | 3′ GGTCCT 5′ |
| reverse sequence | 5′ CCAGGA 3′ |

[0057] Identification of genomic DNA and heterologous species DNA can be accomplished by standard DNA/DNA hybridization techniques, under appropriately stringent conditions, using all or part of a DNA sequence as a probe to screen an appropriate library. Alternatively, PCR techniques using oligonucleotide primers that are designed based on known DNA and protein sequences can be used to amplify and identify other identical or similar DNA sequences. Synthetic DNA corresponding to the identified sequences or variants thereof may be produced by conventional synthesis methods. All of the polynucleotides described herein are isolated and purified, as those terms are commonly used in the art.

[0058] The polynucleotides identified as SEQ ID NOS: 1-80 contain open reading frames (“ORFs”), or partial open reading frames, encoding polypeptides. Additionally, polynucleotides identified as SEQ ID NOS: 1-80 may contain non-coding sequences such as promoters and terminators that may be useful as control elements. Additionally, open reading frames encoding polypeptides may be identified in extended or full-length sequences corresponding to the sequences set out as SEQ ID NOS: 81-183. Open reading frames may be identified using techniques that are well known in the art. These techniques include, for example, analysis for the location of known start and stop codons, most likely reading frame identification based on codon frequencies, similarity to known bacterial expressed genes, etc. Tools and software suitable for ORF analysis include GeneWise (The Sanger Center, Wellcome Trust Genome Campus, Hinxton, Cambridge CB10 1SA, United Kingdom), Diogenes (Computational Biology Centers, University of Minnesota, Academic Health Center, UMHG Box 43 Minneapolis Minn. 55455), and GRAIL (Informatics Group, Oak Ridge National Laboratories, Oak Ridge, Tenn., TN). Open reading frames and portions of open reading frames may be identified in the polynucleotides of the present invention. Once a partial open reading frame is identified, the polynucleotide may be extended in the area of the partial open reading frame using techniques that are well known in the art until the polynucleotide for the full open reading frame is identified. Thus, polynucleotides and open reading frames encoding polypeptides may be identified using the polynucleotides of the present invention.

[0059] Once open reading frames are identified in the polynucleotides of the present invention, the open reading frames may be isolated and/or synthesized. Expressible genetic constructs comprising the open reading frames and suitable promoters, initiators, terminators, etc., which are well known in the art, may then be constructed. Such genetic constructs may be introduced into a host cell to express the polypeptide encoded by the open reading frame. Suitable host cells may include various prokaryotic and eukaryotic cells. In vitro expression of polypeptides is also possible, as well known in the art.

[0060] As used herein, the term “oligonucleotide” refers to a relatively short segment of a polynucleotide sequence, generally comprising between 6 and 60 nucleotides, and comprehends both probes for use in hybridization assays and primers for use in the amplification of DNA by polymerase chain reaction.

[0061] As used herein, the term “x-mer,” with reference to a specific value of “x,” refers to a polynucleotide comprising at least a specified number (“x”) of contiguous residues of any of the polynucleotides identified as SEQ ID NOS: 1-80. The value of x may be from about 20 to about 600, depending upon the specific sequence.

[0062] In another aspect, the present invention provides isolated polypeptides encoded, or partially encoded, by the above polynucleotides. In specific embodiments, such polypeptides comprise a sequence selected from the group consisting of SEQ ID NO: 81-183, and variants thereof. As used herein, the term “polypeptide” encompasses amino acid chains of any length, including full-length proteins, wherein the amino acid residues are linked by covalent peptide bonds. The term “polypeptide encoded by a polynucleotide” as used herein, includes polypeptides encoded by a polynucleotide which comprises an isolated polynucleotide sequence or variant provided herein. Polypeptides of the present invention may be naturally purified products, or may be produced partially or wholly using recombinant techniques. Such polypeptides may be glycosylated with bacterial, fungal, mammalian or other eukaryotic carbohydrates or may be non-glycosylated.

[0063] Polypeptides of the present invention may be produced recombinantly by inserting a polynucleotide that encodes the polypeptide into an expression vector and expressing the polypeptide in an appropriate host. Any of a variety of expression vectors known to those of ordinary skill in the art may be employed. Expression may be achieved in any appropriate host cell that has been transformed or transfected with an expression vector containing a polypeptide encoding a recombinant polypeptide. Suitable host cells include prokaryotes, yeast and higher eukaryotic cells. Preferably, the host cells employed are Escherichia coli, Lactococcus lactis, Lactobacillus, insect, yeast or a mammalian cell line such as COS or CHO. The polynucleotide(s) expressed in this manner may encode naturally occurring polypeptides, portions of naturally occurring polypeptides, or other variants thereof.

[0064] In a related aspect, polypeptides are provided that comprise at least a functional portion of a polypeptide having an amino acid sequence encoded by a polynucleotide of the present invention. As used herein, a “functional portion” of a polypeptide is that portion which contains the active site essential for affecting the function of the polypeptide, for example, the portion of the molecule that is capable of binding one or more reactants. The active site may be made up of separate portions present on one or more polypeptide chains and will generally exhibit high binding affinity.

[0065] Functional portions of a polypeptide may be identified by first preparing fragments of the polypeptide by either chemical or enzymatic digestion of the polypeptide, or by mutation analysis of the polynucleotide that encodes the polypeptide and subsequent expression of the resulting mutant polypeptides. The polypeptide fragments or mutant polypeptides are then tested to determine which portions retain biological activity, using, for example, the representative assays provided below.

[0066] Portions and other variants of the inventive polypeptides may be generated by synthetic or recombinant means. Synthetic polypeptides having fewer than about 100 amino acids, and generally fewer than about 50 amino acids, may be generated using techniques that are well known to those of ordinary skill in the art. For example, such polypeptides may be synthesized using any of the commercially available solid-phase techniques, such as the Merrifield solid-phase synthesis method, where amino acids are sequentially added to a growing amino acid chain (See Merrifield, J. Am. Chem. Soc. 85:2149-2154, 1963). Equipment for automated synthesis of polypeptides is commercially available from suppliers such as Perkin Elmer/Applied Biosystems, Inc. (Foster City, Calif.), and may be operated according to the manufacturer's instructions. Variants of a native polypeptide may be prepared using standard mutagenesis techniques, such as oligonucleotide-directed site-specific mutagenesis (Kunkel, Proc. Natl. Acad. Sci. USA 82: 488-492, 1985). Sections of DNA sequences may also be removed using standard techniques to permit preparation of truncated polypeptides.

[0067] In general, the polypeptides disclosed herein are prepared in an isolated, substantially pure form. Preferably, the polypeptides are at least about 80% pure; more preferably at least about 90% pure; and most preferably at least about 99% pure.

[0068] As used herein, the term “variant” comprehends polynucleotide or polypeptide sequences different from the specifically identified sequences, wherein one or more nucleotides or amino acid residues is deleted, substituted, or added. Variants may be naturally occurring allelic variants, or non-naturally occurring variants. Variant polynucleotide sequences preferably exhibit at least 60%, more preferably at least 75%, more preferably yet at least 90%, and most preferably at least 95% identity to a sequence of the present invention. Variant polypeptide sequences preferably exhibit at least 60%, more preferably at least 75%, more preferably yet at least 90%, and most preferably at least 95% identity to a sequence of the present invention. The percentage identity is determined by aligning the two sequences to be compared as described below, determining the number of identical residues in the aligned portion, dividing that number by the total number of residues in the inventive (queried) sequence, and multiplying the result by 100.

[0069] Polynucleotide and polypeptide sequences may be aligned, and the percentage of identical residues in a specified region may be determined against another polynucleotide or polypeptide, using computer algorithms that are publicly available. Two exemplary algorithms for aligning and identifying the similarity of polynucleotide sequences are the BLASTN and FASTA algorithms. Polynucleotides may also be analyzed using the BLASTX algorithm, which compares the six-frame conceptual translation products of a nucleotide query sequence (both strands) against a protein sequence database. The percentage identity of polypeptide sequences may be examined using the BLASTP algorithm. The BLASTN, BLASTX and BLASTP programs are available on the NCBI anonymous FTP server and from the National Center for Biotechnology Information (NCBI), National Library of Medicine, Building 38A, Room 8N805, Bethesda, Md. 20894, USA. The BLASTN algorithm Version 2.0.4 [Feb. 24, 1998], Version 2.0.6 [Sep. 16, 1998] and Version 2.0.11 [Jan. 20, 2000], set to the parameters described below, is preferred for use in the determination of polynucleotide variants according to the present invention. The BLASTP algorithm, set to the parameters described below, is preferred for use in the determination of polypeptide variants according to the present invention. The use of the BLAST family of algorithms, including BLASTN, BLASTP and BLASTX, is described in the publication of Altschul et al., Nucleic Acids Res. 25: 3389-3402, 1997.

[0070] The computer algorithm FASTA is available on the Internet and from the University of Virginia by contacting David Hudson, Vice Provost for Research, University of Virginia, P.O. Box 9025, Charlottesville, Va. 22906-9025, USA. FASTA Version 2.0u4 [February 1996], set to the default parameters described in the documentation and distributed with the algorithm, may be used in the determination of variants according to the present invention. The use of the FASTA algorithm is described in Pearson and Lipman, Proc. Natl. Acad. Sci. USA 85:2444-2448, 1988; and Pearson, Methods in Enzymol. 183: 63-98, 1990.

[0071] The following running parameters are preferred for determination of alignments and similarities using BLASTN that contribute to the E values and percentage identity for polynucleotide sequences: Unix running command: blastall-p blastn-d embldb-e 10-G0-E0-r1-v30-b30-i queryseq-o results; the parameters are: -p Program Name [String]; -d Database [String]; -e Expectation value (E) [Real]; -G Cost to open a gap (zero invokes default behavior) [Integer]; -E Cost to extend a gap (zero invokes default behavior) [Integer]; -r Reward for a nucleotide match (BLASTN only) [Integer]; -v Number of one-line descriptions (V) [Integer]; -b Number of alignments to show (B) [Integer]; -i Query File [File In]; and -o BLAST report Output File [File Out] Optional.

[0072] The following running parameters are preferred for determination of alignments and similarities using BLASTP that contribute to the E values and percentage identity of polypeptide sequences: blastall-p blastp-d swissprottrembledb-e10-G0-E0-v30-b30-i queryseq-o results; the parameters are: -p Program Name [String]; -d Database [String]; -e Expectation value (E) [Real]; -G Cost to open a gap (zero invokes default behavior) [Integer]; -E Cost to extend a gap (zero invokes default behavior) [Integer]; -v Number of one-line descriptions (v) [Integer]; -b Number of alignments to show (b) [Integer]; -I Query File [File In]; -o BLAST report Output File [File Out] Optional. The “hits” to one or more database sequences by a queried sequence produced by BLASTN, FASTA, BLASTP or a similar algorithm, align and identify similar portions of sequences. The hits are arranged in order of the degree of similarity and the length of sequence overlap. Hits to a database sequence generally represent an overlap over only a fraction of the sequence length of the queried sequence.

[0073] The BLASTN, FASTA, and BLASTP algorithms also produce “Expect” values for alignments. The Expect value (E) indicates the number of hits one can “expect” to see over a certain number of contiguous sequences by chance when searching a database of a certain size. The Expect value is used as a significance threshold for determining whether the hit to a database, such as the preferred EMBL database, indicates true similarity. For example, an E value of 0.1 assigned to a polynucleotide hit is interpreted as meaning that in a database of the size of the EMBL database, one might expect to see 0.1 matches over the aligned portion of the sequence with a similar score simply by chance. By this criterion, the aligned and matched portions of the polynucleotide sequences then have a probability of 90% of being the same. For sequences having an E value of 0.01 or less over aligned and matched portions, the probability of finding a match by chance in the EMBL database is 1% or less using the BLASTN or FASTA algorithm.

[0074] According to one embodiment, “variant” polynucleotides and polypeptides, with reference to each of the polynucleotides and polypeptides of the present invention, preferably comprise sequences producing an E value of 0.01 or less when compared to the polynucleotide or polypeptide of the present invention. That is, a variant polynucleotide or polypeptide is any sequence that has at least a 99% probability of being the same as the polynucleotide or polypeptide of the present invention, measured as having an E value of 0.01 or less using the BLASTN, FASTA, or BLASTP algorithms set at parameters described above. According to a preferred embodiment, a variant polynucleotide is a sequence having the same number or fewer nucleic acids than a polynucleotide of the present invention that has at least a 99% probability of being the same as the polynucleotide of the present invention, measured as having an E value of 0.01 or less using the BLASTN or FASTA algorithms set at parameters described above. Similarly, according to a preferred embodiment, a variant polypeptide is a sequence having the same number or fewer amino acids than a polypeptide of the present invention that has at least a 99% probability of being the same as a polypeptide of the present invention, measured as having an E value of 0.01 or less using the BLASTP algorithm set at the parameters described above.

[0075] As noted above, the percentage identity is determined by aligning sequences using one of the BLASTN, FASTA, or BLASTP algorithms, set at the running parameters described above, and identifying the number of identical nucleic or amino acids over the aligned portions; dividing the number of identical nucleic or amino acids by the total number of nucleic or amino acids of the polynucleotide or polypeptide sequence of the present invention; and then multiplying by 100 to determine the percentage identity. For example, a polynucleotide of the present invention having 220 nucleic acids has a hit to a polynucleotide sequence in the EMBL database having 520 nucleic acids over a stretch of 23 nucleotides in the alignment produced by the BLASTN algorithm using the parameters described above. The 23 nucleotide hit includes 21 identical nucleotides, one gap and one different nucleotide. The percentage identity of the polynucleotide of the present invention to the hit in the EMBL library is thus 21/220 times 100, or 9.5%. The polynucleotide sequence in the EMBL database is thus not a variant of a polynucleotide of the present invention.

[0076] In addition to having a specified percentage identity to an inventive polynucleotide or polypeptide sequence, variant polynucleotides and polypeptides preferably have additional structure and/or functional features in common with the inventive polynucleotide or polypeptide. Polypeptides having a specified degree of identity to a polypeptide of the present invention share a high degree of similarity in their primary structure and have substantially similar functional properties. In addition to sharing a high degree of similarity in their primary structure to polynucleotides of the present invention, polynucleotides having a specified degree of identity to, or capable of hybridizing to an inventive polynucleotide preferably have at least one of the following features: (i) they contain an open reading frame or partial open reading frame encoding a polypeptide having substantially the same functional properties as the polypeptide encoded by the inventive polynucleotide; or (ii) they contain identifiable domains in common.

[0077] Alternatively, variant polynucleotides of the present invention hybridize to the polynucleotide sequences recited in SEQ ID NOS: 1-80, or complements, reverse sequences, or reverse complements of those sequences under stringent conditions. As used herein, “stringent conditions” refers to prewashing in a solution of 6×SSC, 0.2% SDS; hybridizing at 65° C., 6×SSC, 0.2% SDS overnight; followed by two washes of 30 minutes each in 1×SSC, 0.1% SDS at 65° C. and two washes of 30 minutes each in 0.2×SSC, 0.1% SDS at 65° C.

[0078] The present invention also encompasses polynucleotides that differ from the disclosed sequences but that, as a consequence of the discrepancy of the genetic code, encode a polypeptide having similar enzymatic activity as a polypeptide encoded by a polynucleotide of the present invention. Thus, polynucleotides comprising sequences that differ from the polynucleotide sequences recited in SEQ ID NOS: 1-80, or complements, reverse sequences, or reverse complements of those sequences as a result of conservative substitutions are encompassed within the present invention. Additionally, polynucleotides comprising sequences that differ from the inventive polynucleotide sequences or complements, reverse complements, or reverse sequences as a result of deletions and/or insertions totaling less than 10% of the total sequence length are also contemplated by and encompassed within the present invention. Similarly, polypeptides comprising sequences that differ from the inventive polypeptide sequences as a result of amino acid substitutions, insertions, and/or deletions totaling less than 10% of the total sequence length are contemplated by and encompassed within the present invention, provided the variant polypeptide has similar activity to the inventive polypeptide.

[0079] The polynucleotides of the present invention may be isolated from various libraries, or may be synthesized using techniques that are well known in the art. The polynucleotides may be synthesized, for example, using automated oligonucleotide synthesizers (e.g., Beckman Oligo 1000M DNA Synthesizer) to obtain polynucleotide segments of up to 50 or more nucleic acids. A plurality of such polynucleotide segments may then be ligated using standard DNA manipulation techniques that are well known in the art of molecular biology. One conventional and exemplary polynucleotide synthesis technique involves synthesis of a single stranded polynucleotide segment having, for example, 80 nucleic acids, and hybridizing that segment to a synthesized complementary 85 nucleic acid segment to produce a 5-nucleotide overhang. The next segment may then be synthesized in a similar fashion, with a 5-nucleotide overhang on the opposite strand. The “sticky” ends ensure proper ligation when the two portions are hybridized. In this way, a complete polynucleotide of the present invention may be synthesized entirely in vitro.

[0080] Certain of the polynucleotides identified as SEQ ID NOS: 1-80 are generally referred to as “partial” sequences, in that they may not represent the full coding portion of a gene encoding a naturally occurring polypeptide. The partial polynucleotide sequences disclosed herein may be employed to obtain the corresponding full-length genes for various species and organisms by, for example, screening DNA expression libraries using hybridization probes based on the polynucleotides of the present invention, or using PCR amplification with primers based upon the polynucleotides of the present invention. In this way one can, using methods well known in the art, extend a polynucleotide of the present invention upstream and downstream of the corresponding DNA, as well as identify the corresponding mRNA and genomic DNA, including the promoter and enhancer regions, of the complete gene. The present invention thus comprehends isolated polynucleotides comprising a sequence identified in SEQ ID NOS: 1-80, or a variant of one of the specified sequences, that encode a functional polypeptide, including full length genes. Such extended polynucleotides may have a length of from about 50 to about 4,000 nucleic acids or base pairs, and preferably have a length of less than about-4,000 nucleic acids or base pairs, more preferably yet a length of less than about 3,000 nucleic acids or base pairs, more preferably yet a length of less than about 2,000 nucleic acids or base pairs. Under some circumstances, extended polynucleotides of the present invention may have a length of less than about 1,800 nucleic acids or base pairs, preferably less than about 1,600 nucleic acids or base pairs, more preferably less than about 1,400 nucleic acids or base pairs, more preferably yet less than about 1,200 nucleic acids or base pairs, and most preferably less than about 1,000 nucleic acids or base pairs.

[0081] Polynucleotides of the present invention comprehend polynucleotides comprising at least a specified number of contiguous residues α-mers) of any of the polynucleotides identified as SEQ ID NOS: 1-80 or their variants. According to preferred embodiments, the value of x is preferably at least 20, more preferably at least 40, more preferably yet at least 60, and most preferably at least 80. Thus, polynucleotides of the present invention include polynucleotides comprising a 20-mer, a 40-mer, a 60-mer, an 80-mer, a 100-mer, a 120-mer, a 150-mer, a 180-mer, a 220-mer a 250-mer, or a 300-mer, 400-mer, 500-mer or 600-mer of a polynucleotide identified as SEQ ID NOS: 1-80 or a variant of one of the polynucleotides identified as SEQ ID NOS: 1-80.

[0082] Oligonucleotide probes and primers complementary to and/or corresponding to SEQ ID NOS: 1-80, and variants of those sequences, are also comprehended by the present invention. Such oligonucleotide probes and primers are substantially complementary to the polynucleotide of interest. An oligonucleotide probe or primer is described as “corresponding to” a polynucleotide of the present invention, including one of the sequences set out as SEQ ID NOS: 1-80 or a variant, if the oligonucleotide probe or primer, or its complement, is contained within one of the sequences set out as SEQ ID. NOS: 1-80 or a variant of one of the specified sequences.

[0083] Two single stranded sequences are said to be substantially complementary when the nucleotides of one strand, optimally aligned and compared, with the appropriate nucleotide insertions and/or deletions, pair with at least 80%, preferably at least 90% to 95%, and more preferably at least 98% to 100%, of the nucleotides of the other strand. Alternatively, substantial complementarity exists when a first DNA strand will selectively hybridize to a second DNA strand under stringent hybridization conditions. Stringent hybridization conditions for determining complementarity include salt conditions of less than about 1 M, more usually less than about 500 mM and preferably less than about 200 mM. Hybridization temperatures can be as low as 5° C., but are generally greater than about 22° C., more preferably greater than about 30° C. and most preferably greater than about 37° C. Longer DNA fragments may require higher hybridization temperatures for specific hybridization. Since the stringency of hybridization may be affected by other factors such as probe composition, presence of organic solvents and extent of base mismatching, the combination of parameters is more important than the absolute measure of any one alone. DNA-DNA hybridization studies may performed using either genomic DNA or DNA derived by preparing cDNA from the RNA present in a sample to be tested.

[0084] In addition to DNA-DNA hybridization, DNA-RNA or RNA-RNA hybridization assays are also possible. In the first case, the mRNA from expressed genes would then be detected instead of genomic DNA or cDNA derived from mRNA of the sample. In the second case, RNA probes could be used. In addition, artificial analogs of DNA hybridizing specifically to target sequences could also be used.

[0085] In specific embodiments, the oligonucleotide probes and/or primers comprise at least about 6 contiguous residues, more preferably at least about 10 contiguous residues, and most preferably at least about 20 contiguous residues complementary to a polynucleotide sequence of the present invention. Probes and primers of the present invention may be from about 8 to 100 base pairs in length or, preferably from about 10 to 50 base pairs in length or, more preferably from about 15 to 40 base pairs in length. The primers and probes may be readily selected using procedures well known in the art, taking into account DNA-DNA hybridization stringencies, annealing and melting temperatures, potential for formation of loops and other factors, which are well known in the art. Tools and software suitable for designing probes, and especially for designing PCR primers, are available from Premier Biosoft International, 3786 Corina Way, Palo Alto, Calif. 94303-4504. Preferred techniques for designing PCR primers are also disclosed in Dieffenbach and Dyksler, PCR primer: a laboratory manual, CSHL Press: Cold Spring Harbor, N.Y., 1995.

[0086] A plurality of oligonucleotide probes or primers corresponding to a polynucleotide of the present invention may be provided in a kit form. Such kits generally comprise multiple DNA or oligonucleotide probes, each probe being specific for a polynucleotide sequence. Kits of the present invention may comprise one or more probes or primers corresponding to a polynucleotide of the present invention, including a polynucleotide sequence identified in SEQ ID NOS: 1-80.

[0087] In one embodiment useful for high-throughput assays, the oligonucleotide probe kits of the present invention comprise multiple probes in an array format, wherein each probe is immobilized in a predefined, spatially addressable location on the surface of a solid substrate. Array formats which may be usefully employed in the present invention are disclosed, for example, in U.S. Pat. Nos. 5,412,087, 5,545,531, and PCT Publication No. WO 95/00530, the disclosures of which are hereby incorporated by reference.

[0088] Oligonucleotide probes for use in the present invention may be constructed synthetically prior to immobilization on an array, using techniques well known in the art (See, for example, Gait, ed., Oligonucleotide synthesis a practical approach, IRL Press: Oxford, England, 1984). Automated equipment for the synthesis of oligonucleotides is available commercially from such companies as Perkin Elmer/Applied Biosystems Division (Foster City, Calif.) and may be operated according to the manufacturer's instructions. Alternatively, the probes may be constructed directly on the surface of the array using techniques taught, for example, in PCT Publication No. WO 95/00530.

[0089] The solid substrate and the surface thereof preferably form a rigid support and are generally formed from the same material. Examples of materials from which the solid substrate may be constructed include polymers, plastics, resins, membranes, polysaccharides, silica or silica-based materials, carbon, metals and inorganic glasses. Synthetically prepared probes may be immobilized on the surface of the solid substrate using techniques well known in the art, such as those disclosed in U.S. Pat. No. 5,412,087.

[0090] In one such technique, compounds having protected functional groups, such as thiols protected with photochemically removable protecting groups, are attached to the surface of the substrate. Selected regions of the surface are then irradiated with a light source, preferably a laser, to provide reactive thiol groups. This irradiation step is generally performed using a mask having apertures at predefined locations using photolithographic techniques well known in the art of semiconductors. The reactive thiol groups are then incubated with the oligonucleotide probe to be immobilized. The precise conditions for incubation, such as temperature, time and pH, depend on the specific probe and can be easily determined by one of skill in the art. The surface of the substrate is washed free of unbound probe and the irradiation step is repeated using a second mask having a different pattern of apertures. The surface is subsequently incubated with a second, different, probe. Each oligonucleotide probe is typically immobilized in a discrete area of less than about 1 mm². Preferably each discrete area is less than about 10,000 mm², more preferably less than about 100 mm². In this manner, a multitude of oligonucleotide probes may be immobilized at predefined locations on the array.

[0091] The resulting array may be employed to screen for differences in organisms or samples or products containing genetic material as follows. Genomic or cDNA libraries are prepared using techniques well known in the art. The resulting target DNA is then labeled with a suitable marker, such as a radiolabel, chromophore, fluorophore or chemiluminescent agent, using protocols well known for those skilled in the art. A solution of the labeled target DNA is contacted with the surface of the array and incubated for a suitable period of time.

[0092] The surface of the array is then washed free of unbound target DNA and the probes to which the target DNA hybridized are determined by identifying those regions of the array to which the markers are attached. When the marker is a radiolabel, such as ³²P, autoradiography is employed as the detection method. In one embodiment, the marker is a fluorophore, such as fluorescein, and the location of bound target DNA is determined by means of fluorescence spectroscopy. Automated equipment for use in fluorescence scanning of oligonucleotide probe arrays is available from Affymetrix, Inc. (Santa Clara, Calif.) and may be operated according to the manufacturer's instructions. Such equipment may be employed to determine the intensity of fluorescence at each predefined location on the array, thereby providing a measure of the amount of target DNA bound at each location. Such an assay would be able to indicate not only the absence and presence of the marker probe in the target, but also the quantitative amount as well.

[0093] The significance of such high-throughput screening system is apparent for applications such as microbial selection and quality control operations in which there is a need to identify large numbers of samples or products for unwanted materials, to identify microbes or samples or products containing microbial material for quarantine purposes, etc., or to ascertain the true origin of samples or products containing microbes. Screening for the presence or absence of polynucleotides of the present invention used as identifiers for tagging microbes and microbial products can be valuable for later detecting the genetic composition of food, fermentation and industrial microbes or microbes in human or animal digestive system after consumption of probiotics, etc.

[0094] In this manner, oligonucleotide probe kits of the present invention may be employed to examine the presence/absence (or relative amounts in case of mixtures) of polynucleotides in different samples or products containing different materials rapidly and in a cost-effective manner. Examples of microbial species which may be examined using the present invention, include lactic acid bacteria, such as Lactobacillus rhamnosus, and other microbial species.

[0095] Another aspect of the present invention involves collections of a plurality of polynucleotides of the present invention. A collection of a plurality of the polynucleotides of the present invention, particularly the polynucleotides identified as SEQ ID NOS: 1-80, may be recorded and/or stored on a storage medium and subsequently accessed for purposes of analysis, comparison, etc. Suitable storage media include magnetic media such as magnetic diskettes, magnetic tapes, CD-ROM storage media, optical storage media, and the like. Suitable storage media and methods for recording and storing information, as well as accessing information such as polynucleotide sequences recorded on such media, are well known in the art. The polynucleotide information stored on the storage medium is preferably computer-readable and may be used for analysis and comparison of the polynucleotide information.

[0096] Another aspect of the present invention thus involves storage medium on which are recorded a collection of the polynucleotides of the present invention, particularly a collection of the polynucleotides identified as SEQ ID NOS: 1-80. According to one embodiment, the storage medium includes a collection of at least 20, preferably at least 50, more preferably at least 100, and most preferably at least 200 of the polynucleotides of the present invention, preferably the polynucleotides identified as SEQ ID NOS: 1-80, including variants of those polynucleotides.

[0097] Another aspect of the present invention involves a combination of polynucleotides, the combination containing at least 5, preferably at least 10, more preferably at least 20, and most preferably at least 50 different polynucleotides of the present invention, including polynucleotides selected from SEQ ID NOS: 1-80, and variants of these polynucleotides.

[0098] In another aspect, the present invention provides genetic constructs comprising, in the 5′-3′ direction, a gene promoter sequence and an open reading frame coding for at least a functional portion of a polypeptide encoded by a polynucleotide of the present invention. In certain embodiments, the genetic constructs of the present invention also comprise a gene termination sequence. The open reading frame may be oriented in either a sense or antisense direction. Genetic constructs comprising a non-coding region of a gene coding for a polypeptide encoded by an inventive polynucleotide or a nucleotide sequence complementary to a non-coding region, together with a gene promoter sequence, are also provided. A terminator sequence may form part of this construct. Preferably, the gene promoter and termination sequences are functional in a host organism. More preferably, the gene promoter and termination sequences are common to those of the polynucleotide being introduced. The genetic construct may further include a marker for the identification of transformed cells.

[0099] Techniques for operatively linking the components of the genetic constructs are well known in the art and include the use of synthetic linkers containing one or more restriction endonuclease sites as described, for example, by Sambrook et al., in Molecular cloning: a laboratory manual, Cold Spring Harbor Laboratories Press: Cold Spring Harbor, N.Y., 1989. The genetic constructs of the present invention may be linked to a vector having at least one replication system, for example, E. coli, whereby after each manipulation, the resulting construct can be cloned and sequenced and the correctness of the manipulation determined.

[0100] Transgenic microbial cells comprising the genetic constructs of the present invention are also provided by the present invention, together with microbes comprising such transgenic cells, products and progeny of such microbes, and materials including such microbes. Techniques for stably incorporating genetic constructs into the genome of target microbes, such as Lactobacillus species, Lactococcus lactis or E. coli, are well known in the art of bacterial transformation and are exemplified by the transformation of E. coli for sequencing described in Example 1.

[0101] Transgenic non-microbial cells comprising the genetic constructs of the present invention are also provided, together with organisms comprising such transgenic cells, and products and progeny of such organisms. Genetic constructs of the present invention may be stably incorporated into the genomes of non-microbial target organisms, such as fungi, using techniques well known in the art.

[0102] In preferred embodiments, the genetic constructs of the present invention are employed to transform microbes used in the production of food products, ingredients, processing aids, additives or supplements and for the production of microbial products for pharmaceutical uses, particularly for modulating immune system function and immunological effects, and in the production of chemoprotectants providing beneficial effects, probiotics and health supplements. The inventive genetic constructs may also be employed to transform bacteria that are used to produce enzymes or substances such as polysaccharides, flavor compounds and bioactive substances, and to enhance resistance to industrial processes such as drying and to adverse stimuli in the human digestive system. The genes involved in antibiotic production, and phage uptake and resistance in Lactobacillus rhamnosus are considered to be especially useful. The target microbe to be used for transformation with one or more polynucleotides or genetic constructs of the present invention is preferably selected from the group consisting of bacterial genera Lactococcus, Lactobacillus, Streptococcus, Oenococcus, Lactosphaera, Trichococcus, Pediococcus and others potentially useful in various fermentation industries and is most preferably selected from the group consisting of the following Lactobacillus species: Lactobacillus acetotolerans, Lactobacillus acidophilus, Lactobacillus agilis, Lactobacillus alimentarius, Lactobacillus amylolyticus, Lactobacillus amylophilus, Lactobacillus amylovorus, Lactobacillus animalis, Lactobacillus arizonae, Lactobacillus aviarius, Lactobacillus bavaricus, Lactobacillus bifermentans, Lactobacillus brevis, Lactobacillus buchneri, Lactobacillus bulgaricus, Lactobacillus casei, Lactobacillus collinoides, Lactobacillus coryniformis, Lactobacillus crispatus, Lactobacillus curvatus, Lactobacillus delbrueckii, Lactobacillus delbrueckii subsp. bulgaricus, Lactobacillus delbrueckii subsp. lactis, Lactobacillus farciminis, Lactobacillus fermentum, Lactobacillus fructivorans, Lactobacillus gallinarum, Lactobacillus gasseri, Lactobacillus graminis, Lactobacillus hamsteri, Lactobacillus helveticus, Lactobacillus helveticus subsp. jugurti, Lactobacillus hetero, Lactobacillus hilgardii, Lactobacillus homohiochii, Lactobacillus japonicus, Lactobacillus johnsonii, Lactobacillus kefiri, Lactobacillus lactis, Lactobacillus leichmannii, Lactobacillus lindneri, Lactobacillus mali, Lactobacillus maltaromicus, Lactobacillus manihotivorans, Lactobacillus mucosae, Lactobacillus murinus, Lactobacillus oris, Lactobacillus panis, Lactobacillus paracasei, Lactobacillus paracasei subsp. pseudoplantarum, Lactobacillus paraplantarum, Lactobacillus pentosus, Lactobacillus plantarum, Lactobacillus pontis, Lactobacillus reuteri, Lactobacillus rhamnosus, Lactobacillus ruminis, Lactobacillus sake, Lactobacillus salivarius, Lactobacillus salivarius subsp. salicinius, Lactobacillus salivarius subsp. salivarius, Lactobacillus sanfranciscensis, Lactobacillus sharpeae, Lactobacillus thermophilus, Lactobacillus vaginalis, Lactobacillus vermiforme, and Lactobacillus zeae.

[0103] In yet a further aspect, the present invention provides methods for modifying the concentration, composition and/or activity of a polypeptide in a host organism, such as a microbe, comprising stably incorporating a genetic construct of the present invention into the genome of the host organism by transforming the host organism with such a genetic construct. The genetic constructs of the present invention may be used to transform a variety of organisms including plants, such as monocotyledonous angiosperms (e.g., grasses, corn, grains, oat, wheat and barley); dicotyledonous angiosperms (e.g., Arabidopsis, tobacco, legumes, alfalfa, oaks, eucalyptus, maple); gymnosperms, (e.g., Scots pine (Aronen, Finnish Forest Res. Papers, Vol. 595, 1996); white spruce (Ellis et al., Biotechnology 11:84-89, 1993); larch (Huang, et al., In Vitro Cell 27:201-207, 1991); and any kind of plant amenable to genetic engineering.

[0104] Thus, in yet another aspect, transgenic plant cells comprising the genetic constructs of the present invention are provided, together with plants comprising such transgenic cells, and fruits, seeds, products and progeny of such plants. Techniques for stably incorporating genetic constructs into the genome of target organisms, such as plants, are well known in the art and include Agrobacterium tumefaciens mediated introduction, electroporation, protoplast fusion, injection into reproductive organs, injection into immature embryos, high velocity projectile introduction and the like. The choice of technique will depend upon the target plant to be transformed. For example, dicotyledonous plants, and certain monocots and gymnosperms, may be transformed by Agrobacterium Ti plasmid technology, as described, for example by Bevan, Nucleic Acids Res. 12:8711-8721, 1984. Targets for the introduction of the genetic constructs include tissues, such as leaf tissue, disseminated cells, protoplasts, seeds, embryos, meristematic regions, cotyledons, hypocotyls, and the like.

[0105] Once the cells are transformed, cells having the genetic construct incorporated in their genome are selected. Transgenic cells may then be cultured in an appropriate medium, using techniques well known in the art. In the case of protoplasts, the cell wall is allowed to reform under appropriate osmotic conditions. In the case of seeds or embryos, an appropriate germination or callus initiation medium is employed. For explants, an appropriate regeneration medium is used. Regeneration of plants is well established for many species. For a review of regeneration of forest trees, see Dunstan et al., “Somatic embryogenesis in woody plants,” in Thorpe, T. A., ed., In vitro embryogenesis of plants, (Current Plant Science and Biotechnology in Agriculture), 20(12):471-540, 1995. Specific protocols for the regeneration of spruce are discussed by Roberts et al. (“Somatic embryogenesis of Spruce,” in Redenbaugh K., ed., Synseed: applications of synthetic seed to crop improvement, CRC Press: Ch.23:427-449, 1993). The resulting transformed plants may be reproduced sexually or asexually, using methods well known in the art, to give successive generations of transgenic plants and practically unlimited amounts of tagged plant-derived products.

[0106] The polynucleotides of the present invention may be further employed as non-disruptive tags for marking organisms, particularly microbes. Other organisms may, however, be tagged with the polynucleotides of the present invention, including commercially valuable plants, animals, fish, fungi and yeasts. Genetic constructs comprising polynucleotides of the present invention may be stably introduced into an organism as heterologous, non-functional, non-disruptive tags. It is then possible to identify the origin or source of the organism at a later date by determining the presence or absence of the tag(s) in a sample of material. Detection of the tag(s) may be accomplished using a variety of conventional techniques, and will generally involve the use of nucleic acid probes. Sensitivity in assaying the presence of probe can be usefully increased by using branched oligonucleotides, as described by Horn et al., Nucleic Acids Res. 25(23):4842-4849, 1997, enabling detection of as few as 50 DNA molecules in the sample.

[0107] Polynucleotides of the present invention may also be used to specifically suppress gene expression by methods that operate post-transcriptionally to block the synthesis of products of targeted genes, such as RNA interference (RNAi), and quelling. Briefly, traditional methods of gene suppression, employing anti-sense RNA or DNA, operate by binding to the reverse sequence of a gene of interest such that binding interferes with subsequent cellular processes and therefore blocks synthesis of the corresponding protein. RNAi also operates on a post-translational level and is sequence specific, but suppresses gene expression far more efficiently. Exemplary methods for controlling or modifying gene expression using RNAi are provided in WO 99/49029 and WO 99/53050. In these methods, post-transcriptional gene silencing is brought about by a sequence-specific RNA degradation process which results in the rapid degradation of transcripts of sequence-related genes. Studies have shown that double-stranded RNA may act as a mediator of sequence-specific gene silencing (see, for example, Montgomery and Fire, Trends in Genetics, 14:255-258, 1998). Gene constructs that produce transcripts with self-complementary regions are particularly efficient at gene silencing. A unique feature of this post-transcriptional gene silencing pathway is that silencing is not limited to the cells where it is initiated. The gene-silencing effects may be disseminated to other parts of an organism and even transmitted through the germ line to several generations.

[0108] The polynucleotides of the present invention may thus be employed to generate gene silencing constructs and/or gene-specific self-complementary RNA sequences that can be delivered by conventional art-known methods to cells, such as microbial cells. Within genetic constructs, sense and antisense sequences can be placed in regions flanking an intron sequence in proper splicing orientation with donor and acceptor splicing sites, such that intron sequences are removed during processing of the transcript and sense and antisense sequences, as well as splice junction sequences, bind together to form double-stranded RNA. Alternatively, spacer sequences of various lengths may be employed to separate self-complementary regions of sequence in the construct. During processing of the gene construct transcript, intron sequences are spliced-out, allowing sense and anti-sense sequences, as well as splice junction sequences, to bind forming double-stranded RNA. Select ribonucleases then bind to and cleave the double-stranded RNA, thereby initiating the cascade of events leading to degradation of specific mRNA gene sequences, and silencing specific genes. Alternatively, rather than using a gene construct to express the self-complementary RNA sequences, the gene-specific double-stranded RNA segments are delivered to one or more targeted areas to be internalized into the cell cytoplasm to exert a gene silencing effect. The double-stranded RNA must have sufficient homology to the targeted gene to mediate RNAi and is preferably at least 25 nucleotides in length. Preferably, the double-stranded RNA corresponds specifically to a polynucleotide of the present invention. Gene silencing RNA sequences comprising the polynucleotides of the present invention are useful for creating genetically modified organisms, such as microbes, with desired phenotypes as well as for characterizing genes (for example, in high-throughput screening of sequences), and studying their functions in intact organisms.

[0109] In another aspect, the present invention provides methods for using one or more of the inventive polypeptides or polynucleotides to treat disorders in a mammal, such as a human.

[0110] In this aspect, the polypeptide or polynucleotide is generally present within a composition, such as a pharmaceutical or immunogenic composition. Pharmaceutical compositions may comprise one or more polypeptides, each of which may contain one or more of the above sequences (or variants thereof), and a physiologically acceptable carrier. Immunogenic compositions may comprise one or more of the above polypeptides and an immunostimulant, such as an adjuvant or a liposome, into which the polypeptide is incorporated.

[0111] Alternatively, a composition of the present invention may contain DNA encoding one or more polypeptides described herein, such that the polypeptide is generated in situ. In such compositions, the DNA may be present within any of a variety of delivery systems known to those of ordinary skill in the art, including nucleic acid expression systems, and bacterial and viral expression systems. Appropriate nucleic acid expression systems contain the necessary DNA sequences for expression in the patient (such as a suitable promoter and terminator signal). Bacterial delivery systems involve the administration of a bacterium (such as Bacillus Calmette-Guerin) that expresses an immunogenic portion of the polypeptide on its cell surface. In a preferred embodiment, the DNA may be introduced using a viral expression system (e.g., vaccinia or other poxvirus, retrovirus, or adenovirus), which may involve the use of a non-pathogenic, or defective, replication competent virus. Techniques for incorporating DNA into such expression systems are well known in the art. The DNA may also be “naked,” as described, for example, in Ulmer et al., Science 259:1745-1749, 1993 and reviewed by Cohen, Science 259:1691-1692, 1993. The uptake of naked DNA may be increased by coating the DNA onto biodegradable beads, which are efficiently transported into the cells.

[0112] While any suitable carrier known to those of ordinary skill in the art may be employed in the pharmaceutical compositions of this invention, the type of carrier will vary depending on the mode of administration. For parenteral administration, such as subcutaneous injection, the carrier preferably comprises water, saline, alcohol, a lipid, a wax or a buffer. For oral administration, any of the above carriers or a solid carrier, such as mannitol, lactose, starch, magnesium stearate, sodium saccharine, talcum, cellulose, glucose, sucrose, and magnesium carbonate, may be employed. Biodegradable microspheres (e.g., polylactic galactide) may also be employed as carriers for the pharmaceutical compositions of this invention. Suitable biodegradable microspheres are disclosed, for example, in U.S. Pat. Nos. 4,897,268 and 5,075,109.

[0113] Any of a variety of adjuvants may be employed in the immunogenic compositions of the present invention to non-specifically enhance an immune response. Most adjuvants contain a substance designed to protect the antigen from rapid catabolism, such as aluminum hydroxide or mineral oil, and a non-specific stimulator of immune responses, such as lipid A, Bordetella pertussis or M. tuberculosis. Suitable adjuvants are commercially available as, for example, Freund's Incomplete Adjuvant and Freund's Complete Adjuvant (Difco Laboratories, Detroit, Mich.), and Merck Adjuvant 65 (Merck and Company, Inc., Rahway, N.J.). Other suitable adjuvants include alum, biodegradable microspheres, monophosphoryl lipid A and Quil A.

[0114] Routes and frequency of administration, as well as dosage, vary from individual to individual. In general, the inventive compositions may be administered by injection (e.g., intradermal, intramuscular, intravenous or subcutaneous), intranasally (e.g., by aspiration) or orally. In general, the amount of polypeptide present in a dose (or produced in situ by the DNA in a dose) ranges from about 1 pg to about 100 mg per kg of host, typically from about 10 pg to about 1 mg per kg of host, and preferably from about 100 pg to about 1 μg per kg of host. Suitable dose sizes will vary with the size of the patient, but will typically range from about 0.1 ml to about 2 ml.

[0115] The following examples are offered by way of illustration and not by way of limitation.

### EXAMPLE 1

### Isolation and Characterization of DNA Sequences from Lactobacillus Rhamnosus Strain HN001

[0116] Lactobacillus rhamnosus strain HN001 DNA libraries were constructed and screened as follows.

[0117] DNA was prepared in large scale by cultivating the bacteria in 2×100 ml cultures with 100 ml MRS broth (Difco Laboratories, Detroit Mich.) and 1 ml Lactobacillus glycerol stock as inoculum, placed into 500 ml culture flasks and incubated at 37° C. for approx. 16 hours with shaking (220 rpm).

[0118] The cultures were centrifuged at 3500 rpm for 10 min to pellet the cells. The supernatant was removed and the cell pellet resuspended in 40 ml fresh MRS broth and transferred to clean 500 ml culture flasks. Fresh MRS broth (60 ml) was added to bring the volume back to 100 ml and flasks were incubated for a further 2 hrs at 37° C. with shaking (220 rpm). The cells were pelleted by centrifugation (3500 rpm for 10 min) and supernatant removed. Cell pellets were washed twice in 20 ml buffer A (50 mM NaCl, 30 mM Tris pH 8.0, 0.5 mM EDTA).

[0119] Cells were resuspended in 2.5 ml buffer B (25% sucrose (w/v), 50 mM Tris pH 8.0, 1 mM EDTA, 20 mg/ml lysozyme, 20 μg/ml mutanolysin) and incubated at 37° C. for 45 min. Equal volumes of EDTA (0.25 M) was added to each tube and allowed to incubate at room temperature for 5 min. 20% SDS (1 ml) solution was added, mixed and incubated at 65° C. for 90 min. 50 μl Proteinase K (Gibco BRL, Gaithersburg, Md.) from a stock solution of 20 mg/ml was added and tubes incubated at 65° C. for 15 min.

[0120] DNA was extracted with equal volumes of phenol:chloroform:isoamylalcohol (25:24:1). Tubes were centrifuged at 3500 rpm for 40 min. The aqueous phase was removed to clean sterile Oak Ridge centrifuge tubes (30 ml). Crude DNA was precipitated with an equal volume of cold isopropanol and incubated at −20° C. overnight.

[0121] After resuspension in 500 μl TE buffer, DNase-free RNase was added to a final concentraion of 100 μg/ml and incubated at 37° C. for 30 min. The incubation was extended for a further 30 min after adding 100 μl Proteinase K from a stock solution of 20 mg/ml. DNA was precipitated with ethanol after a phenol:chloroform:isoamylalcohol (25:24:1) and a chloroform:isoamylalcohol (24:1) extraction and dissolved in 250 μl TE buffer.

[0122] DNA was digested with Sau3AI at a concentration of 0.004 U/μg in a total volume of 1480 μl, with 996 μl DNA, 138.75 μl 10× REACT 4 buffer and 252.75 μl H₂O. Following incubation for 1 hour at 37° C., DNA was divided into two tubes. 31 μl 0.5 M EDTA was added to stop the digestion and 17 μl samples were taken for agarose gel analysis. Samples were put into 15 ml Falcon tubes and diluted to 3 ml for loading onto sucrose gradient tubes.

[0123] Sucrose gradient size fractionation was conducted as follows. 100 ml of 50% sucrose (w/v) was made in TEN buffer (1M NaCl, 20 mM Tris pH 8.0, 5 mM EDTA) and sterile filtered. Dilutions of 5, 10, 15, 20, 25, 30, 35 and 40% sucrose were prepared and overlaid carefully in Beckman Polyallomer tubes, and kept overnight at 4° C. TEN buffer (4 ml) was loaded onto the gradient, with 3 ml of DNA solution on top. The gradients were centrifuged at 26K for 18 hours at 4° C. in a Centricon T-2060 centrifuge using a Kontron TST 28-38 rotor. After deceleration without braking (approx. 1 hour), the gradients were removed and fractions collected using an auto Densi-Flow (Haake-Buchler Instruments). Agarose gel was used to analyze the fractions. The best two pairs of fractions were pooled and diluted to contain less than 10% sucrose. TEN buffer (4 ml) was added and DNA precipitated with 2 volumes of 100% ice cold ethanol and an overnight incubation at −20° C.

[0124] DNA pellets were resuspended in 300 μl TE buffer and re-precipitated for approx. 6 hours at −20° C. after adding 1/10 volume 3 M NaOAC pH 5.2 and 2 volumes of ethanol. DNA was pelleted at top speed in a microcentrifuge for 15 min, washed with 70% ethanol and pelleted again, dried and resuspended in 10 μl TE buffer.

[0125] DNA was ligated into dephosphorylated BamHI-digested pBluescript SK II⁺ and dephosphorylated BamHI-digested lambda ZAP Express using standard protocols. Packaging of the DNA was done using Gigapack III Gold packaging extract (Stratagene, La Jolla, Calif.) following the manufacturer's protocols. Packaged libraries were stored at 4° C.

[0126] Mass excision from the primary packaged phage library was done using XL1-Blue MRF′ cells and ExAssist Helper Phage (Stratagene). The excised phagemids were diluted with NZY broth (Gibco BRL, Gaithersburg, Md.) and plated out onto LB-kanamycin agar plates containing 5-bromo-4-chloro-3-indolyl-β-D-galactoside (X-gal) and isopropylthio-beta-galactoside (IPTG). After incubation, single colonies were picked for PCR size determination before the most suitable libraries were selected for sequencing.

[0127] Of the colonies picked for DNA minipreps and subsequent sequencing, the large majority contained an insert suitable for sequencing. Positive colonies were cultured in LB broth with kanamycin or ampicillin depending on the vector used, and DNA was purified by means of rapid alkaline lysis minipreps (solutions: Qiagen, Venlo, The Netherlands; clearing plates, Millipore, Bedford, Mass.). Agarose gels at 1% were used to screen sequencing templates for chromosomal contamination and concentration. Dye terminator sequencing reactions were prepared using a Biomek 2000 robot (Beckman Coulter, Inc., Fullerton, Calif.) and Hydra 96 (Robbins Scientific, Sunnyvale, Calif.) for liquid handling. DNA amplification was done in a 9700 PCR machine (Perkin Elmer/Applied Biosystems, Foster City, Calif.) according to the manufacturer's protocol.

[0128] The sequence of the genomic DNA fragments was determined using a Perkin Elmer/Applied Biosystems Division Prism 377 sequencer. The DNA clones were sequenced from the 5′ and/or 3′ end, and are identified as SEQ ID NOS: 1-80 disclosed herein.

[0129] This example not only shows how the sequences were obtained, but also that a bacterium (E. coli) can be stably transformed with any desired DNA fragment of the present invention for permanent marking for stable inheritance.

BLASTN Polynucleotide Analysis

[0130] The determined DNA sequences were compared to and aligned with known sequences in the public databases. Specifically, the polynucleotides identified in SEQ ID NO: 1-80 were compared to polynucleotides in the EMBL database as of Aug. 12, 2002, using BLASTN algorithm Version 2.0.11 [Jan. 20, 2000], set to the following running parameters: Unix running command: blastall-p blastn-d embldb-e 10-G0-E0-r1-v30-b30-i queryseq-o results. Multiple alignments of redundant sequences were used to build up reliable consensus sequences.

[0131] The cDNA sequences of SEQ ID NOS: 1-32 and 34-80 were determined to have less than 60% identity, determined as described above, to sequences in the EMBL database using the computer algorithm BLASTN, as described above. The cDNA sequence of SEQ ID NO: 33 was determined to have less than 90% identity, determined as described above, to sequences in the EMBL database using BLASTN, as described above.

BLASTP Amino Acid Analysis

[0132] The polypeptide sequences were compared to sequences in the SwissProt-TrEMBLE protein databases using the computer algorithm BLASTP. Comparisons of amino acid sequences provided in SEQ ID NOS: 81-183 to sequences in the SwissProt-TrEMBLE protein databases (using BLASTP) were made as of Aug. 12, 2002 using BLASTN algorithm Version 2.0.11 [Jan. 20, 2000], and the following Unix running command: blastall-p blastp-d swissprottrembledb-e10-G0-E0-v30-b30-i queryseq-o.

[0133] The predicted amino acid sequences of SEQ ID NOS: 84-86, 89, 90, 92, 95, 96, 101-103, 108, 111, 114, 116, 119-122, 124, 125, 130, 134-136, 140, 146, 147, 152, 156, 159, 162, 164, 166, 168, 175 and 183 were determined to have less than 50% identity, determined as described above, to sequences in the SWISSPROT-TrEMBLE database using the BLASTP computer algorithm as described above. The predicted amino acid sequences of SEQ ID NOS: 81-83, 88, 91, 93, 94, 97-100, 104-107, 109, 110, 112, 113, 115, 123, 127-129, 131-133, 137, 138, 141-145, 148-151, 153-155, 157, 158, 160, 161, 163, 165, 167, 169-173 and 180-182 were determined to have less than 75% identity, determined as described above, to sequences in the SWISSPROT-TrEMBLE database using the computer algorithm BLASTP, as described above. The predicted amino acid sequences of SEQ ID NOS: 87, 139 and 176-179 were determined to have less than 90% identity, determined as described above, to sequences in the SWISSPROT-TrEMBLE database using the computer algorithm BLASTP, as described above. The predicted amino acid sequences of SEQ ID NOS: 117, 118 and 126 were determined to have less than 98% identity, determined as described above, to sequences in the SWISSPROT-TrEMBLE database using the computer algorithm BLASTP, as described above.

BLASTX Polynucleotide Analysis

[0134] The isolated cDNA sequences were compared to sequences in the SwissProt-TrEMBLE protein databases using the computer algorithm BLASTX. Comparisons of DNA sequences provided in SEQ ID NOS: 1-80, to sequences in the SwissProt-TrEMBLE database (using BLASTX) were made as of Aug. 12, 2002 using BLAST algorithm Version 2.0.11 [Jan. 20, 2000], and the following Unix running command: blastall-p blastx-d swissprottrembleldb-e 10-G0-E0-v30-b30-i queryseq-o.

[0135] The cDNA sequences of SEQ ID NOS: 1-14, 16-49, 52-58, 60-72, 74-78 and 80 were determined to have less than 50% identity, determined as described above, to sequences in the SWISSPROT-TrEMBLE database using the computer algorithm BLASTX, as described above. The cDNA sequences of SEQ ID NOS: 15, 50, 51, 59, 73 and 79 were determined to have less than 75% identity, determined as described above, to sequences in the SWISSPROT-TrEMBLE database using BLASTX, as described above.

[0136] Based on similarity to known sequences, the isolated polynucleotides of the present invention identified as SEQ ID NOS: 1-80 were putatively identified as encoding polypeptides having similarity to the polypeptides shown above in Table 1. The amino acid sequences encoded by the DNA sequences of SEQ ID NO: 1-80 are provided in SEQ ID NO: 81-183, respectively.

[0137] Several of the sequences provided in SEQ ID NO: 1-80 were found to be full-length and to contain open reading frames (ORFs). These full-length sequences, the location of ORFs (by nucleotide position) contained within these sequences, and the corresponding amino acid sequences are provided in Table 2 below.

TABLE 2

| Polynucleotide | | Polypeptide |
|---|---|---|
| SEQ ID NO: | ORF | SEQ ID NO: |
| 1 | 5831-7288 | 81 |
| 2 | 4395-5630 | 82 |
| 3 | 1445-2791 | 83 |
| 4 | 316-1413 | 84 |
| 5 | 1392-2444 | 85 |
| 6 | 1-1083 | 86 |
| 7 | 2881-4071 | 87 |
| 8 | 1859-3295 | 88 |
| 9 | 265-1023 | 89 |
| 10 | 1160-2005 | 90 |
| 11 | 2324-3604 | 91 |
| 11 | 548-1696 | 92 |
| 12 | 1102-2358 | 93 |
| 12 | 188-1020 | 94 |
| 13 | 140-1138 | 95 |
| 14 | 5612-6413 | 96 |
| 15 | 84-2276 | 97 |
| 16 | 1130-2275 | 98 |
| 17 | 1644-2645 | 99 |
| 18 | 500-2404 | 100 |
| 19 | 110-1153 | 101 |
| 20 | 167-718 | 102 |
| 21 | 1-3669 | 103 |
| 22 | 2327-4951 | 104 |
| 23 | 522-1694 | 105 |
| 24 | 973-2928 | 106 |
| 25 | 133-1296 | 107 |
| 26 | 1938-3497 | 108 |
| 27 | 69-716 | 109 |
| 28 | 125-1054 | 110 |
| 29 | 84-3377 | 111 |
| 30 | 555-887 | 112 |
| 30 | 226-558 | 113 |
| 31 | 77-862 | 114 |
| 32 | 3135-4673 | 115 |
| 32 | 6384-7877 | 116 |
| 33 | 412-828 | 117 |
| 33 | 863-1663 | 118 |
| 34 | 1642-2682 | 119 |
| 35 | 814-2037 | 120 |
| 35 | 3510-5084 | 121 |
| 36 | 101-1222 | 122 |
| 37 | 113-760 | 123 |
| 38 | 1-477 | 124 |
| 39 | 12447-13400 | 125 |
| 40 | 1186-2439 | 126 |
| 41 | 7973-8812 | 127 |
| 41 | 6950-7924 | 128 |
| 41 | 1925-2773 | 129 |
| 41 | 3916-4956 | 130 |
| 41 | 1023-1895 | 131 |
| 41 | 8822-10489 | 132 |
| 42 | 102-860 | 133 |
| 43 | 3759-4343 | 134 |
| 44 | 622-1113 | 135 |
| 45 | 1129-1722 | 136 |
| 46 | 1216-2439 | 137 |
| 46 | 2345-3835 | 138 |
| 47 | 6155-8361 | 139 |
| 48 | 550-1176 | 140 |
| 49 | 455-901 | 141 |
| 51 | 31-1179 | 143 |
| 52 | 766-2142 | 144 |
| 53 | 2336-3817 | 145 |
| 54 | 7567-9057 | 146 |
| 55 | 3713-4447 | 147 |
| 56 | 426-1625 | 148 |
| 57 | 138-851 | 149 |
| 58 | 3066-4769 | 150 |
| 59 | 31-1188 | 151 |
| 60 | 132-1328 | 152 |
| 61 | 94-534 | 153 |
| 62 | 652-1998 | 154 |
| 63 | 1033-1905 | 155 |
| 63 | 1902-2789 | 156 |
| 64 | 951-1646 | 157 |
| 64 | 1824-3227 | 158 |
| 65 | 179-1030 | 159 |
| 66 | 1244-2425 | 160 |
| 67 | 6885-7589 | 161 |
| 68 | 333-1121 | 162 |
| 69 | 2638-4251 | 163 |
| 69 | 1312-2622 | 164 |
| 70 | 1587-2441 | 165 |
| 71 | 4642-6489 | 166 |
| 71 | 7554-8516 | 167 |
| 71 | 6625-7536 | 168 |
| 71 | 8518-9469 | 169 |
| 72 | 2344-3732 | 170 |
| 72 | 3755-5674 | 171 |
| 73 | 102-1874 | 172 |
| 74 | 2993-4429 | 173 |
| 75 | 1008-1499 | 174 |
| 76 | 3565-5967 | 175 |
| 77 | 759-1708 | 176 |
| 77 | 1488-2837 | 177 |
| 77 | 3295-4074 | 178 |
| 77 | 4071-5096 | 179 |
| 77 | 2692-3291 | 180 |
| 78 | 165-842 | 181 |
| 79 | 66-2291 | 182 |
| 80 | 269-1006 | 183 |

### EXAMPLE 2

### Isolation and Characterization of Purine Nucleoside Phosphorylase from L. Rhamnosus Strain HN001

[0138] The full-length polynucleotide sequence of the deoD purine nucleoside phosphorylase gene AQ1 from L. rhamnosus HN001 is given in SEQ ID NO: 78 and shown in FIG. 1 (with ATG initiation and translation stop codons boxed). The polypeptide sequence of AQ1 is given in SEQ ID NO: 181 and shown in FIG. 2.

[0139] A 634 bp internal AQ1 fragment was amplified by PCR using standard laboratory protocols. The nucleotide sequences of the oligonucleotide primers are given in SEQ ID NOS: 184 and 185. The fragments were cloned into the pBEry1 vector cut with SmaI. The 3.6 kb pBEry1 vector was constructed using the replicon and multiple cloning site (MCS) from the phagemid pBlueScript (pBS-SK+) (Stratagene, La Jolla Calif., USA). The ampicillin resistance gene in pBS-SK+ was removed by digestion with RcaI (Roche, Auckland, New Zealand), and the 1,953 bp fragment containing the ColE1 origin and multiple cloning site purified and treated with Klenow enzyme (Roche) to give a blunt-ended fragment. A gene encoding resistance to erythromycin (Em) was isolated on a 1.6 kb fragment obtained after cutting pVA891 (Macrina et al., Gene 25:145-50, 1983) with ClaI and HindIII and treatment with Klenow to give blunt ends. The 1.6 kb Em fragment was ligated to the 1,953 bp pBS-SK+ fragment, transformed into E. coli TG1 (Gibson T J, Studies on the Epstein-Barr virus genome. Ph.D. Thesis, University of Cambridge, Cambridge, England, 1984), and plated on LB agar plates containing 200 μg/ml Em. Maintenance of α-complementation for blue/white color selection of recombinant pBEry1 clones was confirmed by growing E. coli colonies on agar plates containing IPTG and X-gal.

[0140] The resulting pBEry1 construct encoding the HN001 deoD purine nucleoside phosphorylase AQ1 gene was transformed into competent HN001 cells and grown anaerobically for 48 hrs at 37° C. on MRS lactobacilli agar (Difco, Detroit Mich.) containing 2.5 μg/ml Em. Em-resistant HN001 were checked for integration of the plasmid construct into the deoD gene by PCR using vector-specific (T3 or T7) and AQ1 internal fragment-specific primers.

[0141] Colonies giving PCR patterns consistent with the insertional inactivation of the endogenous HN001 deoD purine nucleoside phosphorylase AQ1 gene were assessed for increased resistance to UV irradiation. Briefly, single colonies of wild-type of AQ1-knockout HN001 strains were inoculated into 5 ml MRS, incubated aerobically overnight at 37° C., and 0.1 ml then used to inoculate a 10 ml MRS culture. Cultures were grown to log phase (i.e. an OD₆₀₀ of approximately 0.3) at 37° C., and then 5 ml of culture taken and cells collected by centrifugation. Cells were resuspended in 1 ml normal saline (0.9% NaCl), and 20 μl aliquots placed on sterile petri dishes. Petri dishes were then placed uncovered and inverted onto a standard laboratory transilluminator and exposed to UV light for 0, 20 or 30 seconds. Samples were transferred to 1 ml MRS media and grown for 2 hours at 37° C. in the dark. Following culture, samples were appropriately diluted and duplicate samples plated onto MRS plates, incubated anaerobically for 48 hours at 37° C. and colonies counted.

[0142] FIG. 3 shows the results of UV light exposure assay measuring relative viability in response to increasing doses of UV light for AQ1⁻ HN001 strain (♦) and wild-type HN001 (▪). Results indicate that the AQ1⁻ HN001 mutant strain showed enhanced survival to exposure to UV light compared to wild-type HN001. UV light exposure of 20 seconds appeared to have no effect on AQ1⁻ viability while the viability of wild-type HN001 cells had dropped to 34.7%. After 30 seconds UV light exposure, 86.9% of AQ1⁻ cells survived compared to only 27.9% for wild type. Therefore, removal of AQ1 gene expression led to enhanced survival of UV light exposure, indicating that AQ1 encodes the HN001 deoD purine nucleoside phosphorylase.

[0143] Purine nucleoside phosphorylase (EC 2.4.2.1) is involved in the purine biosynthesis and salvage pathways. Its role in maintaining intracellular guanosine pools suggests that it may be involved in resistance to a number of stress conditions including UV light exposure, as well as high salt, pH and temperature (Duwat et al, Int J Food Microbiol. 55:83-6, 2000). Applications for HN001 purine nucleoside phosphorylase AQ1 include:
[0144] methods of enhanced survival of industrial processes;
[0145] improved colonization of human intestinal environment; and
[0146] improved survival of multiple stress conditions.

### EXAMPLE 3

### Isolation and Characterization of GTP Pyrophosphokinase from L. Rhamnosus HN001

[0147] The full-length polynucleotide sequence of the relA GTP pyrophosphokinase gene AM1 from L. rhamnosus HN001 is given in SEQ ID NO: 79 and shown in FIG. 4 (with ATG initiation and translation stop codons boxed). The polypeptide sequence of AM1 is given in SEQ ID NO: 182 and shown in FIG. 5.

[0148] A 798 bp internal AM1 fragment was amplified by PCR using standard laboratory protocols. The nucleotide sequences of the oligonucleotide primers are given in SEQ ID NOS: 186 and 187. The fragments were cloned into the pBEry1 vector cut with SmaI, as described in Example 2. The resulting pBEry1 construct encoding the HN001 relA GTP pyrophosphokinase AM1 gene was transformed into competent HN001 cells and grown anaerobically for 48 hrs at 37° C. on MRS lactobacilli agar (Difco, Detroit Mich.) containing 2.5 μg/ml Em. Em-resistant HN001 were checked for integration of the plasmid construct into the relA gene by PCR using vector-specific (T3 or T7) and AM1 internal fragment-specific primers.

[0149] Colonies giving PCR patterns consistent with the insertional inactivation of the endogenous HN001 relA GTP pyrophosphokinase AM1 gene, were assessed for increased resistance to UV irradiation as described in Example 2.

[0150] FIG. 6 shows the results of a UV light exposure assay measuring relative viability in response to increasing doses of UV light in AM1⁻ HN001 (♦) and wild-type HN001 (▪) strains. Results indicate that the AM1⁻ HN001 mutant strain showed enhanced survival to exposure to UV light compared to wild-type HN001. UV light exposure of 20 seconds appeared to have little effect on AM1⁻ cell viability (91.7%) while the viability of wild-type HN001 cells had dropped to 34.7%. After 30 seconds UV light exposure, 61.1% of AM1⁻ cells survived compared to only 27.9% for wild type. Therefore, removal of AM1 gene expression led to enhanced survival of UV light exposure, indicating that AM1 encodes the HN001 relA GTP pyrophosphokinase.

[0151] GTP pyrophosphokinase or (EC 2.7.6.5) produces guanosine 3′-diphosphate 5′-triphosphate, a marker of the “stringent response”, a regulatory state induced in bacteria by nutrient starvation and other environmental stresses (reviewed in Chatterji and Ojha, Curr Opin Microbiol. 4:160-5, 2001). Studies have indicated that suppression of GTP pyrophosphokinase relA gene expression improved the resistance to a number of stress conditions including UV light exposure, as well as high salt, pH and temperature, in Lactococcus lactis (Duwat et al, Int J. Food Microbiol. 55:83-6, 2000). Applications for HN001 GTP pyrophosphokinase AM1 include:
[0152] methods of enhanced survival of industrial processes;
[0153] improved colonization of human intestinal environment; and
[0154] improved survival of Lactobacilli to multiple stress conditions.

[0155] SEQ ID NOS: 1-187 are set out in the attached Sequence Listing. The codes for nucleotide sequences used in the attached Sequence Listing, including the symbol “n,” conform to WIPO Standard ST.25 (1998), Appendix 2, Table 1.

[0156] All references cited herein, including patent references and non-patent publications, are hereby incorporated by reference in their entireties.

[0157] While in the foregoing specification this invention has been described in relation to certain preferred embodiments, and many details have been set forth for purposes of illustration, it will be apparent to those skilled in the art that the invention is susceptible to additional embodiments and that certain of the details described herein may be varied considerably without departing from the basic principles of the invention.

The application's sequence listing, which the Patent Office published only in electronic form, follows.

SEQUENCE LISTING (187 sequences)

SEQ ID NO: 1 - DNA, 10889 bp, LACTOBACILLUS RHAMNOSUS
aaaatgccagggagtgttccacaaaatgtgtttgattcattctttgccttgattccaatggcggaagtgttgctgttgtttggacttgcacgaattgggctgcaagcgatgggttatgcaagtttaattcaactgattgctacagttatcatcaaaccactattaaccgtggggacaggcttaccagcaattatcgtggtgattttgttagagcagattctttggttccttggcttgcatggcttcaacattgtctggggtgtcgtgtctgcgttctggttaccactatttctacaaaatgttgctaagtttgctgaaaccaaaagttttgctgacatcactatttcgccgaatacaatgaccaatgtttatgccatgatcggcggttcgggcgcgacatttggactaatcattgccatgttgatttttgcaaaaaaaggtgaaaaagagcgagaagtagcgaaattagcattagtgcccggatgttttggaattaatgaaccggttatcttcggtagttttgctgacatcactatttcgccgaatacaatgaccaatgtttatgccatgatcggcggttcgggcgcgacatttggactaatcattgccatgttgatttttgcaaaaaaaggtgaaaaagagcgagaagtagcgaaattagcattagtgcccggatgttttggaattaatgaaccggttatcttcggtttaccgattgttttaaatccgattatgttgattccctggatcgttgtccctctgttcaatgcagtcgttgcatacgttgtgacctctatcggctgggtggttccactggtggtcttgaattctggtaacgaaccaattttctttagcacatggattttaggcggattgcatacgagtccagtcattcttgcacttgtcttggttatattcgatgtcctgttatatgcgccattcgttatcatgaatcaacgcaatgagcgtcaaatggcgtctgcggcataaacagtataagtaaattgtgacgaaaaaaggaagtttaataaatgcaaagagttcacgttatagcccatacccattgggattttgaatggtacttcacacgtcagcatgcaagggttcaatttgcttatcatatggaagaggtattgcaagctcttactaataaccagctggacgcttatcttcttgatggacaaatggcgattatcgatgattacctacaaacgaatcctgataagcgggatgagatccgtcaatttgttcaagctcgacgactttttatcggtccatggtatacccagattgatgagatggtgacaagtggtgagtcgattgttcgcaatttacagttgggacataaattagctgcggatttaggcggggccatgaaagttgggtatttaccggactcttttgggcagggaaaagatatgcccaagatctattcggggtttgacatcaccgcaactgttttttggcgcggtatgcctcacgagaaggatgcacgttacttttattggacagctgaggatggttcaagggtattagcggcaaacattaaaaatggttattatgccggagttgaactaattgaaaatgatgatgccacaactcttttacaacgaattgcaacggacaccaagtcacatgacttagtacttccggtcggtggtgatcagcgagctgttgattttaacttgaaagaacgaatcgcattggcaaacgatcacgaagattcatttaagttagttgaagataattacccggacttcttcgcatcattggcaaaaaatagggagttgcctacgtatcaaggggagtttatcgatccctcagcttctaaaattcaccgaggtatctactcatcgcgagcagatttaaaacggctttatgatcggcttgaacatcttatggtagatgtggttgagccgctgatggtcattgctgcacatcaaggtattaaggcacaaagcgggctggtagaacaggtttggaaaacaattgctcgtggccaagcgcatgatagttccggcggatgtaattccgatgtgacaaatcgtgatatttaccagcgtggtaacaatgcgttacaactggcaacgtccttacgcgattatctcttacgcaaattagcaagtagttcagcgccgtcactcaatgttttcttttggaatccaaccatacaatcagttactcggacaggtcagataacagttgccacccgtgataagtactttgctcttaaagatgagcacggtctgccggttacttatgaagtattgcggcaagttcaagttgatgatgcggttttgcgtcgtgacaaaacacaagaaaagccgatgatttactaccagacaactattgcagtgccattagtgatgaaagcaatggactgggttggatttacattagaatctgcacaacaagcggttccattaaggtcagacagtacaaccattcgcaatgagtactacacactgagttttacgaacggtgagctcaaattgacggacaatcgaacagggcagtctttcgtcaacccgattcattttgatgatggtggcgatgaaggcgacacgtatgattactcgccagcatatcaagattggctcatcaacttaacacttgaagaggctgaagtgacaggccatcagggaaagttagtcagtgaattgagtttcaaaggaggctggcacctaccaaaagacctttcagaccgcgccgcaaaaaaagcaaatgtcatcctaccttatacgcttgaattgaaattgttagcaaatgatccggttattcattttaaactaacggttgataataatatccttgatcatcgcctacgactgattttaacgacgccagtacatgcacagtatagttttgccgacacgccgtttggagttgctaaacgtccggtcgttgatccacacctgaatgactggcaagcaatcggttatcatgaagaacccactggtttgcggccaatgattcattttgcaaatacccacgatccaatcactagctggacatttctttgtcttggtgagaaagaatgccagcttattgggcaacattttgaacaactagctgtcacgatgtttcgaggtgtcggttatcttggccgtccggatttgaaacgccgtccgggtgatgcctcaggtttacagacgcggtacgtgccaacacctgatagccagttgttgggaaggcaacaactggagggcggtatttgccttgatgaacagttcaatccggctgagatacaacaacgcgtgcaggctttagcgataggagatttaagctatcaaaagcagacacttaatcgctttacaacaccgctacaatatttcccgataaatgctaatcagactgctttagaacaccagccgtcacttcggctgaacacgcgtgacctagttatatccagtgtaactgcaacttcagaccaggctggttatctcgtgcgggtttataatcccacatcagattcgtgtgaagaccccggagtatttgagtttgcttggctagccagtgttcggctactaacccttaatcacgaaaccaaggaaactgtcgcaaccagtgtctcacactatcaacttacgccattcaaggctggagaaatacgtacatacggtatttacccgcttaataatgacgttgcagcttcgaaaggatgatcatgacgatagaaaaagtaaagttggcaacagcattaactgattttgttgatgctcatccattagcagatttgaatgcacaaagaatgttccgggcgctgttgccagacgcattaataaaagcgacaagtctccaacccgatggcacttattttgttgcaacgggcgatattccggcgatgtggttgcgggatgcgacttttcaggtattaccttatgttcagcttgtcaaagctatccccgatctggaagtcattttaaaaggtgtgcttcgccgcgaactagactttattcaactggatccatacgcaaatgcctttaatgaaacgatcagtggcgcccactggtgtgatgcggatgaaaccaatatacaagtttcgccgcaagtttgggagcgtaagtttgagattgataccctttgtgctcctttactactagcgttacgtctgtttgcggagactggtgatgcgacaatttttgataccgatttttggacaactttagcggtaattgtcgatgtttttgagcaggaacagcatcatgaacattcaccatactttttccgccgtcccaatacagctagtaacgacacattgcctcatcaaggttatggcagtcccgtagcggtgacggggttaatttgggatggttttcgaccaagtgataatcgatgtgaacatggctatcacattccggctaacttattggccaaaacagttttaacttcattattaccttatattccagagaatcgacaagcactagcgattcgcgtaaagacgctggtggcagctataagccaaggaattactgaatatggtattcaaacgttgcctagtggtgaacggggatttgcttacgaggttgatggccttggccacgcttgtttcatggatgatgccaacgtgccgagtttattgagcctgccttttttgggggcgttgagtgctgaagatccgctttatatagcaacaaagtcgtttgtaactagtatgcaaaatccatatttctataaaggcagcgtgttacaaggaattggcagcgaacatacaccaccgcggtatgtttggccgatcgccgtagccatggaaggattagtagcaacagcagattcaatcaaacaagacaaactagcattaatagctgcaactactggggatactgggcagtgtcatgaaggtgtgcatcaagatgattcaaggcaatatacgcgaacttggttttcgtgggcaaacatgactttttgtcagctggcgcttgatgttattcagtggcagaaaagggaagtgaaaccatgagcctagcagtgattgatattggcggaacgagcattaagtttggacaatacgattcggtaacaggcgtttcatttcgaacaaatgcatcgactccgaagacattgccagaattttacaagctgctgcaaaagaagatcgtacaattgcgtgcagtaggtgatattactggcgttgccattagcagtcccggtatggttgatcaaattactgggattattcgcggagccagcgcagttccgtacattcataatttcccgattgtagcagaactaaataatcgttttgaattaccggttgccattgaaaatgatgctaattgtgcagcacttgcggaagtacatgctggtgcagcccgggatgtgcgagatgctgtttttatagtgctcggtacgggcgttggcggcgctgttgtattgaatcgccaagttcggcatggtcaacatcttttgggtggcgaacttggatacatgttacacggtgaagctgacactgttagtcatcttggtacagtggtaaacgctgtggcacgatacaaccgtataaatgggacaaagttagatggtaaagggttatatgaattagcacaacacggcaacgtctctgcaaaaaaagcaattcaagatatgttggatgttgtcgcaaccacgatttttaatttgcaatatagtcttgatccggagtgcttcatcattggtggcggcgtgtcacaaaacccagctttactgacagatttagagcaagcacttgattctgtcatggctcacgttgggattgcaccattacgaccgcaaattcgaattgctagctttcaggcagatgccaatttatacggagcagccattaacttcgagcaatttagcctgagaaatggtgattaagcagagacgcggagaaagaaggggagttatcatccaatttaatgctgattttgtctggggagcagctacaagtggtccgcaggcagaaggaacttttcataaaaaacatgaaaacatttttgactatcattaccatacccgccctcaggattttcatcataatgttggaccggatgtagcatcgaatttttataacgattatattgctgacctgaaactgttaaaacgtgctggtgttcaggcattacggatttctattcagtggacaagattgattgacgacttggaagaggcgactgtggatcaggcaggtgcggattactatcggcgtgtgtttgcagaaatgcatgatcttggcatcacaccgtatgttaatttacatcatttcgatttaccggttgtgctacagcaccaatatggcggttggcaatccaaacatgttgttgaactttatgcaaaatttgctgcacgctgttttgaactctttagtgatcaagtcacgcactggtttacattcaatgagcctaaagtaatcgttgatggccaatatttatatcaatttcactatccaaatattgttgatggaaaggcggcagtacaggtggcctataatctgaacctagctagtgctaaggccattgctgtatttagaaagcttaatcgtaatcctaagggcaccattggcaccattattaatttgacgcctgtttatcctgcgtcacaagcagataatgatcgggcagctgcccactttgccgagttgtgggccaatgatctttatatggagccagcgattcatggttattttcctgaagaacttgttgaccgacttgagcgggatggtgttttatgggatgcaacaccagatgaactagatatcatttcggctaaccgcattgatgtacttggcgtcaattattaccatccttttcgcgttcaagcgccagcaattgatcctgagagcctgcagccatggttgcctgatatttattttgatcattacgaattgccaggtagaaagatgaacttggataaggggtgggagatttatcctgctgcactgtacgatattgcgatgaatataaaagatcgctatgacaatataccttggtttgtggcggaaaacggcattggtgtggcagatgaaactcgtttcttgaaagatggcgtcatacaagacgactaccgtattcgatttatgactgagcaccttcaattcttgaatcgggcaattgcaaaaggcgctaattgtcacggttacttttcgtggaccggcattgattgttggtcgtggctaaatgcatataaaaatcgttacggtctgatccgcaatgatttgcgcacccaaaccaaatcacttaaaaaatcgggttactggtttcaaaaagtttcgtcaaccgggcacgtgcccgagcttgcaatgcagtcgggcaacaaaggtagatagaagaaaggactttaatcatggcaaaaaaagataaaacgatcatgctagtttgcgcggcggggatgtctacaagcatgttggtcaagaaaatggcagatgcagcggaaaaagcaggcattaacgtagcgatatttgccgcatcggcagcagatgctcaagatcgcttggcagctgatcatcccgatgttttattgttagggccacaagttcgctatttagaaggcgattttaaaaagtctttgacgattcctgttgcggtcattgatatgcaagattacgggcttatgaaaggtgatcgcgtattacaaacagcgttagatttaatgccgtcatgacgggaaagttttaagacagctgagtcaattgggaggtgaaagtgtcatggatgaagcacaacaacttgttgttatgcaactcattatggcgggtggtaacgcaaaaagttctgctattgaggcaattagggcggcaaaagctgctgattttgaacaggctgcggtcaagcttaaagaagcagatcaatttttagcggaagcgcataatgctcagaccagcatgctgactgatgaggcaaatggacaccatcaatccgtgtctttattgatggtgcatggtcaggatcacgtcatgacggccattacgtttcgagatctagcaggtgaagtggttgatctgtacaaacgaattgccaccaaaagcgaataattgggtcaatcagatttgaaaatgctcacagacattctgtttgtgggtattttttttgcatttttccaaaatttaaaactgatgagcgcggtctttgtggcatgaagcgttcaccttgtacatgtaaattactaacggggtgtacaaaagccgtcatgaaagcgcctccacaagtcgcggattgacacgtacaattgatattgaacctggaggtgagggttgagtgaagaaacgcaacttgcaaatcctttcagaaattattcggcatcctaatttgagaagtggtgatttggagaaacagtttaaaattacacgtcggcaactaacctatgctttggcacagatcaatcaggagctggttgaccgtcaattgcctaaaattacccgtactcctcgaggtgaatttgtgacaccaagcgaagtcgccgaatttttcaatctgcaaaacggtgaaacagcggcgccatatgtttaccgcgaagaagatgaacgagtgctactcatttgcctgtatttactcgtgagtgatgaacagttgtcactggtgcatttatatgatttcagtggagttagtcgaaccaccacttccgctgatctgaaaatagttgcacattttctggagcggcggcaattggcgcttaagtatacgcgacaggctggctatttcattgctggatccgagcagatcatccgtaatttgctgaattatctagtaactcagttgctgaaatatgatgatggtcgtggttcaatcgaacaactaagtacagtgccacctgagcaagtgatccactttattcacaaaattgaaagtgttcggcatgtcacctattcggatgaatcgtttagcttcttgatgttggcggtgttgatgaatgtcacgcgtaatctatcacagcggacaagagacaaccactattttgtgcatcagatcaatgacaccaaggaattttcattgcttaagccgctgatacctaaaaagtggttagtctgtgattccgatgctgaatggattgtgatgttgctattatctgcgaacacgattcgtggcgaagttggtgtagcagatactgacttggttgcggccatccgaacaatggtttccaagtttgaacagcagacgtttattaaaattgatgaccagaaagatttcgtaaaccggttacttgctcatttgcgtccggcaatcttccgcgttcgctatggtttgcatctgcacgacattgggattggtcaagtgatggcggctgatcctcgacatcaatttttggtcgacacgatcaatgccattgttgcaccactcgagaagctaaccggtaagccgattccggaagatgagcgaaacctgatcgccttttactttgatggtgagttggaaaagtcagctgatttgcatgccaataaagaacgcgctgcggttgtttgtacgaatggcctgattgtttcaaagctgatgattcagaacctgcgtcggctatttccggaaatcagctttttgtctgccacatccgctcgtgaatttgaacatttttcaggcgattacgacttggttttcacaaccgttcccttgaagacttcggcgcgtcaatacattattcatccgctgttaagcgaggatgagcaaatgcagctgcgatatcgcgtcttaaatgatattggcgtaaagaatattcaaaccggaatagcggcgttaactgcgattgtacgcaaacatgccaagattacggattctgaaggattggatcaagcattgcggcggtttctggctgatcaaggtgttgagacacttccagaaacgcagcaaccccaactgtcagccatgactgcatcgagtttgattcaaattggtcaaagcgatgattgggagacagcattgcgtcaagcgatccgcccattggaacaattgaaatacgttaccgagccgtttcggcaaacgctcatgaacgaaacggtggcaccggataattatagctttattggtaccgaggttgccattccccatactgttccggaaaacggagttcttcgtaacggctttgctttttacattctgaagcatccggtgacgtatccgaacggttttcgcattcgcatgatcgtaccgattgcggttaagaatacggatcagcacttgcgagcgattcaggagttatcggagctcattgctgacgagccggcactaaagcaattactaaaatcaaaaacgaatcagcaagcgtatgaagtgttgcaagcgtatgaagcaaggttacgcacgagttcataagctttgagaagcaaggaaaataatgtgagtttggttatcaagactaatgcaccggctcacgctcaggaggaagattatggagttatcagagtatccgacttttacagttattatgcgcggttatacgcctgaacaggctgatgccattatgcaggcgatggctgggtttgaaaatcaatttggtgttgaagtgacgatgaatacgccgcatgcactggacattatcgaagaaggtaatgcgcagtacggggaccgaatcaagatcggcgccgggacggtgacaacgctgaccgaggctcaagacgctatagctaaaggtgcgaaatttatgctaagtccaattgagtttacggacgacatttttgcctatgccaaacagcatggagtcatcaccgtgccggctgctatgacaccgactgaagttcatacgatgtttgaaaaaggtgcagatattgtcaaagtctttccggcaacgacagtcgggtcaggattctttaaagctattcaggcaccacttggaaaattaccactgatggcagttggaggggtttcgatctgggcgtggatggctggcgtttggatgtcgccgatgagctgactgacgactttattcatcaaattcggacgaca

SEQ ID NO: 2 - DNA, 5731 bp, LACTOBACILLUS RHAMNOSUS
  MISC_FEATURE (1)...(5731): N = A,T,C OR G
aaaggattgatggctttcgaatggatgttatcaatctgatttcaaagcctgatgtttttgctgatgatccacaccttttggaacagccaaacggtaactcgctgggcttaattgccaatggtccgcacgtgcacgaatacttacgtgcgatgaacaaggcggttttgtccaagcacgatcttatgacagttggcgaggcacccggcgttacgcccgccttggcacttcaatatactggtttcgatcgccacgagcttgaaatggtcttccagtttaaacatgttggccttgataacgatccacaattcggcaagtggtcactcaaacatcctcagttgaccgatcagtgaaacctttaaatcgcaattctggaactttctttttaactgaatcatctattttcgccatagtccccaccattttcttgttcttctatccttttttgaactttgatttgttcctgcaaattttccaacttctctttaagagcgttcacttcatctttatattgattgtctaagtgtttgaattctgtttcctgtgagggcattttgagaacttttaagttcgggtgcaaattttcctcgctgacttgaatttagtatactgggtgccaagaaacgaaggattgcgcgcatgaatcactttaaaggaccccactttcaaaaggacatcatcttagtagccggtggctactatttcagatttcgtctccactttcgtgccatcgttgaatgcttcaggatccgcaaacgcaccggctgcttggaggcgcagttctgtccacttacgacgtcaccgcgcaaggcaacgttttggccctagccattcaacacggcctcacgttggaagacttagctgaagccgacttcttcttccagccaggattcgaccggcaatggagcctactcaacctcgccgctcaacacgcactaggtgaaccacgcttctagtcagttgctagtcctactgcaacattgtttcctcttttaatcatcagccatgcaaaaagaccaagctttcactgatttagtgagcttggtcttttttgagtgagcgtgagccagcccggtctgaaaccggagtgtaagcggccttaaccgtgatggccgctctttggccattgcgctaaagtccttacacgcagatctctgcgccagtgaacgcgttatgacaagcgtgaactggcccgcttagagatctgcacgatgatggccatgaaggttaaagacgcacagccttatgccgcatactccggctcaccttcacgtaacttaccatccaaaagcgtaaacttccgatcagcaaacttttcaaggcgaacatcgtgggtcacgacaacaatcgctttgttatgcttgtgggcaagatcagccaacaactggccaaccactgccacccgcgggctatcgagtgccgcagtcggttcatccgccagtacaatcgccggatccggataaagcgcccgcgcaatcgctacacgctgggtttgaccgcctgataacgatgccggatactgattgaccaagttggcaatacccagatcatccaataactcagaaagggctgctcgactaaggttcccttttggtttgattttatcgaccagcttaaactgctcaccgactgttaaatacggcaccaagttataagactgcagaacaaagccgattttgtctaaccgcaacgcatcccgcgctttaccagaaagttgttccagattttccccggctgtggtcacaatcccgtcagtcggggtttgaatccccccggcgatggttaggaatgtgctttttcccgatccagatggcccgagtaccaacgagagactgccggcatcggcactgaaattgacgttcttgagtacttcaacgtcactggttggcgttttaaagtttttaatgatgttttttaattcgattgctggcatatcatcaacctccaatagcggtaacaggatcaacttttaagatggtgcgtacagggataatcgcgccgagaaaaccggtgagcaggatgcctaagataacggcaatactgagtcccgccgagaaaatcatcggcacacccagcggcatgaacttggcggtaatcgccgtcaatgcgccgcctaagacgagtcccagactgactaaaatcagtgcctgatcaatcgtggtcgcaaccaaggtccgtgctggtacaccttgggcccgcaataccgcatagtttggcagtttttgcatggtcaaaatgtagaggaaaacggcgataacgatcagtgaaatgacaaacaggaacccaatcataaaggtaaaggtgctattttgcgccgaataccctgggagtttctgaataaacgtgttggccgaatacgtcttaagatcgctggtgttgattttaaaatcggccgtcttggagatgatcccactggcggtaaaactggtcggcagattgtgcaaggtgcgccaagtggtcatcgtgccatagaccaccggcgccacactcattttggcgttctcggtaaacccgacaatggtgtagcgatcgcctttagtactcaagcgaatcttatcgccaagcgtgtaaccttcattcttgaattgcgtgtccaccaccacttgatgatcgttttgaacccggtgaccactgaccaacttcatgtccttgccaatatattgatcccaatccaaaccaatcatcgtggagcggatctctttgtgctggctgctcgttgccaccgcgccgattgttccgacataggcctgacttttacctagcttgagatcaggatgaggatcggtacttgttggattatctaaaactcaatgttgatcaatccggcattatttatgcaagtacgcgcaaagaagtcgatcggatttatgcgtttttgcagcataagcagttgccggtagccaaatatcacgccggcatgactgaaaagcaacgtgctgctaatcaggaagactttttgtttgatcgtaagccgattatggtcgctaccaacgcgtttgggatggggattgataaaagtaacgttcgcttcgtgattcatgcccagattcccaaagatttggaatcgtattatcaagaagcaggtcgcgccggtcgtgatgggttgcctagtgaggcgatcttgttatttagaccgcaagacttgcaggtgcaacggttttttattgaacagtctgaaggtgacgaggcgcatcaacggcggcagtatgaaaaacttaaagttatggaacgctatgccaacaccgatcagtgtctgcagcagtttattttgaactattttggtcagactggcactgccccgtgtggacgttgttcgaactgcctagatgatcgtgaatccgttgatgtgaccattgacgcgcagaaggttctgtcgtgcgttgtccgattgcatgagcgatttggtaaaggcattgttgcccaggtcttggctggcgcccacaatcagcgcgttttgtcgtttcaccttgatcaattgtcaacatatgggttgatgaaaaatcggcgacagcgggatattacgacctttattgatttcctgaccgctggtggctttctggaaacgtgtggtggtcagtatccaacgcttggtttaaccgcaaaaggtgctgaagtgttacgcgggcagacaactgttttccaaaagaccgcgcaaaaagttactcagacgcttgaagttgatgacacagtcttccaagaactgcgcagtactcgccggcaactggcggagcagcagcatttaccgccgtatatgattttttccgataagacgttaaaagcgattggcaatgcgatgccgaaaacgttggatgagttgctggcggttaaaggggttggccaggcgaaacttgataagtatgggcagattttcttggacgtattgcaggcgattcaaacggagaaagcgtgattagggctcacgcttgcgataacgcgttccccagggcagggatctgcgtgtaaggaccttggtcgcgatggccaaagcccggccatcacgtctgaggccacttacactccggtttctaaccgggctggctcacgctcaccataacgcgttcgctggcgcaggaatctgcgtgtaaggaccttggtcgcaatggccaagagcgggccatcacgcccaagagcgggccatcacgcccaaggccgcttacgttctagcttatgcccataacgcgttcgccagcccagaaacctgcgtgtaaggacctcagccgcaatggccaaagcccggccatcacgtctgaggccacttacactccggtttctaaccgggctggctcacgctcacacaaataataacgcatagaaaaaccgagccgttgatttttgcagaatgagtgcaaaaaagtcgcggctcggttttttactaaaataacggtagcgatgagaagttaggcccagtcgccgttgcggaaaattgggatgatggttccgtctggtttaatgccgtcaatgttcatcgcggctgagcccatcatgaagtcaacgtgggtcggactttggtttaatcccgccgccgcgcgttgttcgttggtcatggcaaccccgtctttgactgagaacggataggcttgaccgagtgccatatgatcggaagcattttcgtcaaacagcgtattgaagaaaataaggcccgattgtgagatgggagaaggatccggaaccaacgacacttcgcctaatgaacgagcacccggcgtttttagcaggttttgtaagacgtcatcgccttgtttggcgtgggcttccacgatttgcccgtctttgaaagtaaagtgcatatcttcgaggatgttgccgccataactaagcggtttggtggaagcaacggtcccgtcgatgcgccgaaaatcaggggcggtgaagacttcctcggttggcatgttagccataaattcctcaccacgcgggttaaaagcgccggcgccttcccaaatgtggttctttggtaaaccgactaccaaatccgttcccggagccatgtaatgcagctgatcaaattgttcgttgtttaaccaggccgctttttcccgcagcttttgatcgtgggctttccaggcagcttccggatcgggttgatcgattcgggtagttttgaaaattgcctcccagagtagctcagttgcttcttcaggggtggcggcatcagggaaaactttttgagcccagcgcggacttgcagcaccgataatcgtccagctaatgctcatggaactgattgcttccatgagtcgtttgtaggcttttgcgaacgcttcttgatacttggcaatgcggttggaatcaattcctgccaagttatccggatctgatgaaaccacggtaatccgcttggcttggtgatcaacccaataatcgaattgacctttgacaaacgccgggatgttgaaaaggcgctcgtttgccatgtgcgccatatctaaacgcttgagtacatcatcgaaccactgaacctgaacttccgcggcaccgcgttggtaagcagcctcaacgatcaagcgtgccatctgtgcttggtccactgaaatttgcacgtaaacggtatcgccgggtttaacggccaccccaatatcgactgccaattcggcatattttttaaggctttcgttaaagttagataatgtcataaaaatgctcctcctcaaagtgattggcaatagtttaccatagggcggcgaattcgatatcaagcttataaagacgtcgaanntntcnaaagcnttcaatt

SEQ ID NO: 3 - DNA, 2998 bp, LACTOBACILLUS RHAMNOSUS
aaattaaagcctttcaagatcagcttgatcagcatccggcatcgggtgcacttggccgagctgtccaaaatgtcgggccacaagccgcaagccgtgaaaccatggacggcgaagatatgaagccggttttctcaattgatctggacaccggcagcgttgccaaccagaaaaaaagcggtcggtgctggctctttgcgacattgaatacagtccgccacgggattgcggatgaatttggcatcaaggatatcgaattctcacaaaactacaatgccttctttgatcgcttggaaaaagccaatttattttatgaaaatattctggcaaccgcggacaaacccctggatgatcgagaggttgccacttacttaagcggtccagatgaagatggtggccactacgatcaagcggccgccttaattgaaaagtacggtttggtgcctaagtcggtcatgccggaaacttataacagcgacaaaaccgctgaactcaacagtgtgttgaacgagaaattgcgtaaggatgccaaggtgttgcggaccctcaagcaagataacgccagcgaagaagccatcgccaagcaaaagcgcgaatttctcagtgttgtttatcgcattttggcttacacctttggcaatccgccgacaacgtttgattttgaataccgtgatgacaagaagcaataccatcgcgatactaacttgaccccgcagtcattcttcaaaaagtacgtcaaatggcatttcgacgattacgtggtgattgccggcgatcccgaaccaaccaaaaagtatcagcaattgtatacgatcagtgcggccaatacggttgtggaaggccatccgctgacaattttaaatctcccaccggaacgcttgaagcagttggcattaacgcaattgcaagcaggtgaagctgtctggtttggcaatgatgtactagccgacatggatcgcaaatccggcacgcttaaaggcggcttgttcaattacagtgatttgtttggtatcgatttccacgtgaacaaaaccgaccgtatcgtgaccaccgaagcggaaatgtcccacgccatgaccctaaccggcgccgatgtcgttgatggcacggtcaccaaatggaaagtcgaaaactcatggggcaaagaaaatggccatgatggttactttgtggccgatgccagctggtttgaccagtacgtttatgaagtcgtggttcgcaaggatcttttaactgacgcggaacaagcgcttcttcaaaccgagccgatcaacttgcctgtatgggattttctaaattaagattaactgatatgctaaactaagcgagtcacaaaacgggtgccggcttatgacgaaatcttcgccgccttttcgaacgaccatgattttcattaccagccgcatggtgactcagcttatgcatataaaaagggagtgtttatttaatgtctgcagaaattacttcaggcgatttggatcagttcaaacaggatcttcaagccacacctgccgccaacgccttacaaaaagcggtcatgaacaatggtattaatgcaactgccgagaataccgatagcaaagttgccatgacaccaacgttctcaattgaacttgataccggtgctgtgtcaaaccaaaaacaaagcggccggtgctggatgttcgccgccttgaatactatgcgtcatggcattcaggcacagtttaagatcaaggattttgaactgtcccaaaactacaccttcttctgggacaagtttgaaaagtccaactatttttatgaaaatgtcttaaaaaccgctgatcaaccactctacagccgtaaagttgcctttcttttggctaccccgcaacaagatggcggccaatgggatatgttgtcagccttaatcgaaaagtatggcattgtgccgaagtcagtaatgcctgaaacctacagttctagcaagagtaacgaattaaatggtttgctcaacttgaaactgcgtaaagatgcggtcaccctacgcaagttagttgctgataaagctagcgatgccgacattgaagcagccaagcaaaaaatgctggctgaagactatcgcatctgggcatacacgttaggcaacccgccaaccaaatttgactttgaataccgcgatgatgataagaattatcacattgatcgcgaattgacgccgcaaaccttcttcaagaagtatgtcggctggaatctcgatgactatcaaagtatcatcaacgccccaaccgctgacaagccttacaagcacctttacaccgttgaaatgctgggcaatgtcgtaggtggtcgtgaagttcgccacttgaatcttgacattgataccttcaaagacttggcaatcaagcaactcaaggccggcgaatcagtttggttcggttccgatgttggtcaaagctccgatcgtcaacttggcattttggacaccaacatttacaagaaagatgacctgttcaacaccgacttcaccatgactaaagctgaacgccttgactatggcgaaagcttgatgactcacgcaatggtcttgaccggcgttgatcttgtagacggcaagccaaccaagtggaaagttgaaaactcttggggtgaaaaagtcggcgaaaaaggctactttgtcgcaagtgatgcgtggtttgaccaattcgtctaccaagttgttatttccaagaagtatctcccagctgaactacaggatgtcatcaagaacgaatacgacaagccaaccgttcttgcaccttgggatccaatgggtgctttggcatcaagataagcttgatctgaaaacactaagataactggaaaagtctcgtaattttgatctaaagttacgaggctttttgtgtacggccgtaagcgattcaaaccaatgcggctgactgagtgacttaacgctcataacgcgttttccagcgcagaagtctttgagtctgataaaattgtggtattctggttgcaactggattaaatcaaatgagga

SEQ ID NO: 4 - DNA, 1758 bp, LACTOBACILLUS RHAMNOSUS
ctagtcgccggagttaaaagtggcaaaatcaattccgctcagacagtagcagcggtcacttattacctcgcctttgtcgctaaaaaataaagcgcacatttttgccgttttatgacgaatgaataaccaactttaaccaagccagtccgcatcgttagcagattctgttgcgtactggcttggcttttttaataacatgattgcgcaaaaaatgagcagacgggattgcactcatgtggatatttatgcataatatatttacattttccaagataacgggtaaactctaagacaattaagaaagcaggtggcgtaatgttacgcaacagtattgccgggctgccggattatgtctcagacagcaccccggaaagaatcgccaaagcggccggtttggctaaaatgacgcgcttgtcattcaatgaaaatccggtcggtacctcgccaaaggtccaggcagcgcttgaaaactgggccttttcccaggcacgcaattatcctgatccggatgcgctgccattgcggaccgcggttgccaaacggttggacataccagcggagcaattacttttttccagtggattagacgaaatgattgctttgatttgtcgcacttttttagaagtaggcgatgagagcctacaaccttggccgacttacccggagtaccagttacaagccgccattgccggagccacaacgattaatgcccccgtgattgccgcgaccggtttgattgatcttgacgcgttattagcccacatcacgacaaaaaccaaagtgatctgggtatgcaaccccaacaatccgacaggtacttatttgcccccggatcaaatcgcgcaggttatgaagcaggtgccgcccaacattctcgttgtcgtggacgaagcgtatatcgattttgtcaatcagcccgagccatccacgctatcgttgactcatcagtttcccaatctgctcgtcatgcgaaccttctcgaaattatacgggttagcaaattttcgagttggcttcagtattgttcctaaagcactcatccccaaaatgcaaaatgtccgtctcccgtataacatcagcggcatgagtcaggcagcggctttagcggcctgggaagatcagacattcacacgcaaggtaaaacaacagatttttgccgcccggaagcagtggcatcaattttttgatcagcaccaaatccgccattatgccacacaaaccaatttcatgctctatcaggtcaatgatccgcaagcactgggcactttcctgaaacagcacggttatctggtgcgtgacagcatggttcctggctggattcgtcaaagctttggaacgccaaagcaagatgcagaagttcaacaactgttactgacttttttaggaatcaaacagacttcaaatattagctaatttttgtatatttgtttataaaaatgccaaaataaaaaaacaaataatcgatcattgaaaaatttttttgccgcacattaaaaaaatatggttgacaatttttaaaatgtcgttatgatgagagtcacattaaatcaatagccatgaagttgtgattagaccaagtaggttggcaccaatccacagagagcgccgattgctgagaacgcgtgattgaccgactgaacacacatctaagaacttgatagccgaaccgagtaagctatcacgcacctgttgcgttatcaccgctgccaataacagttcgcgcaagccgacatgggattggtagatgaggtttgggtc

SEQ ID NO: 5 - DNA, 2625 bp, LACTOBACILLUS RHAMNOSUS
gatcgcgtgaaggtggttcgcgcggggcttgaacttggaagtttccgtaaaaaccggtttgaacctagccacagcatcgcaactgcgctagatccatctgactttcaaaccgtgattgaggtggatgccgatggttatgcgcgctaccgtcatggcgaaacgctcacgacctcgctgtcagggaaacgattcgtcttactcacgtttgaacataagccgtttgcaatcggcaagttagtcaatggaacggttaagaatttctatccaaaagggctgcgagtttagttggcttgcaatttagtatcagcatcttaaaaagtaatcaaaaaggatgttagtgacaggctaggtattgtctgtttactagcatccttttgttattgacctaaaatcaaattgctggcaagtgacggacatggcgataatattctaattcaggactgagcacagccggtgccgtttgcagtgcttgccagttggtcacgcctagcaatgcatacagttgccgtaattgttgcaggaattcctgaaagtaggctaatgtagccgcatagtcagtttgaatcaagtggtgcagcaccagtccactgatgcccaccgcatgcgcccccaagcgttgtgccttaatgacatccagcggcgatcgaatgccaccggttgccaggattgttaacggtagtccgcgggcttcaagcagtgactcaacggttgtttgcccccaatcctgcaggtaggaaaagtcgtggtgggggcggcgagcattttcgatgaccgcaaagttcgtgccgccgcgcccgccgatatcgacataatgaatgcctagttgctgcaaggtttgcagatcttcgcggatgaagccgttacctacttccttaaccacaaccggaaccgaagcagttgctgcaatggtacggatattttcctgccacaaaaagtcgcgatcaccttctggcatgatcacttcttgtgccgcattgacgtgaatttcaagtgcatccgcgtctaacatactaattgccttttcagctgcgtgctgatcgtgtccggcaccgatattggcaagaataaaaccatccggattatgatcacgcagcgttttaaaagtaggggccaattgaggatcatgtaaggccacggattgagagccgctagcaattgccagatcaagcgcctgagctaattgccctagctgagcattgagcttgccggtttgcggggaacctcctgtcatcgcattaatgtaaatcggccaacgccagccaaaaggaatgggaggcgtcaagtcaacatctgctaatgaggattccggaagtgcccggtgtagtagccgaacttgatcgaagccggcatgcgcagtcgcctgaaaatatttttccgctaaaaagacgtgctcatccttgcgatgtgattgctgactctgtgtcattaaattgctcctttgtaatcacttgcgcgtccgggccgaggcgggtgctcaaaatccggtcgccaaaaacaggctgcaaggcggtcatgagaacatccacgtacggtgcggttgtgaggatcttgacgttgggtccggcatccatcgtggcaaacgccggaatgccgagtgcccgctgttcttgcaccaattgccaggcgcgtaaagtttccggcaaaaagtaggtgaacggcggctcctcagccataatggcggcgtgcatgcgcatactcgataattcggtgagtgcaccaatcgtcgtcagatcattttcggccagtgccgtgatcataggtgaaattaacgcttcattcgattgcacccatgcctggtaataagggctggtcgcaaccgtgttggccatgcctgtgcgggagctgactgcctttttctgatcagaaaccgtgacgaccaacatccgcagcggcagcgttggctgaatggttaggggttcggcaaacgaggattgatcatcgctgccacggtgccaaatcaccgctccgccaaagattgaacgagtggctgatcctgaaccgcgacgtgccaaccgtgacaaggcggtaggggttaaatttaggccagccgcgcgacttgcagccaatgccagcgccgcaaacgcagaagccgaactggccaaaccggcagcagtcggtacatgattcaatgaggtgacccgagcgcgtgtatcaatttgggccaggtgccgaacatgatccaaaaagcggctgacagcagtaggcgactgcatttggtgattcaacgtcaattgatcctgattgagttcagggtcaaaagttaccgccgtgtccgtgtaaaagtcatttagagtaagcgaaatactgctggttgccggcagcatcaattgcttatttgctttgccccaatatttgatcaatgcaatgttagtgtgcgcgcgtgcataagttgtcatagcagcctcatttcgtttcaaagtggtattcccagactttaacggcattggctacctttagtgcctggataattgccggtgcctggtccgcggcggcaagggcaatcatgcagccgcccatgccggaaccggtcagtttcgccccatatgcgccgttatcaagggcaacattaatcagtcgatcgagttcaggactgctgacgccaagggccgccaagtccgcttgatc

SEQ ID NO: 6 - DNA, 1083 bp, LACTOBACILLUS RHAMNOSUS
atgagattaaagcaattggttgcgggtgccatcacggttgcaacattagccggtgttggggtttcaggtttcgcggcaacaaccgttcatgcggcagacgacaaagcgagcctgcaagcgcaaaatgacgatttgttgaaacaggttcaggctgccaacgaaaaaagcgccaaactgaacaacgaggtttccaataaggttctggcgattcaggatgccgaagccaagatcaaggacagtcaggccaagatcgctgatttcgcaacacaactgacaaaagccaatcaggaagtcagcaagcgtaagagcaatttgaaggatcagctgatctctttgcaaaagcgtgccggcgactcggttactggcaatgtctattttgactttattttgaattccgacagtctgacggatcttgtcggccggtcattgacagttagcaagttgagtcaagccagcgccgaagctttgcaagccgttaaagactctgaagccaaggttaaaaacctgaaagctgctcagaaagctaaccaaaagaatctggttgctaccaagagccagcttgaaagtgataaagccaagattgatggcttaaaggcggatgctgataaggcagctgccgatgctcaacaaacgattgatgctaacaaagaaaagctggcagccatggccgctgatgaagctgccaaagctgaggcggctcaaaaagcagttacagctgttgctagttccaccgctagtgcatcaagcacttctgcttcctctagcacaaccgcttcttcaaatagtctcggctctagtaaagctgcatcttctcaggctcccgcttcagctggaagcagcacagtttccgtgtccggtggcagcatcgccggtaacgccgctaaatacctcggcgtaccgtatgtttatggtggcacatcacctgctgggtttgactgctcaggcttaatctattacgcagctaaagaagccggaattagcctgccacgtacctctcaggcgcaaagcacacttggctcatatgtttcggtttccgatctgagttttctaatgcgcagattttcagaagttattcggcgttaa

SEQ ID NO: 7 - DNA, 5347 bp, LACTOBACILLUS RHAMNOSUS
aatctggtcgctcttggtggggtacgtgagaatggaaaaaacatgtacgccgtcgaagttgacgaccaaatttttgtatgcgattttgggttgaaataccctgataatgaattacttgggattgatgttgtgatcccggactttagctatttgactgaaaatgccgaccgaattgccggaatctttctaagtcacggccatgcggatgcagtaggagccttaccttattttcttgtggatcatccagttccggtttttggttcggaattgacgattgcaatggccaaggtcttcatgcagcatgacagcaaagccaagaagtttaaagactttcatgttattgatgaaaagtcggtcattgactttggtgatgtgtcggtatcgttctttaaaacaacgcatagcattccaggctcgttaggtatcgatattgaaaccagcgaaggccagattgtgtataccggcgactttaagtttgatcctagcgctaccccgatgtatcaaacggattgggcgcgattggcacaaatcggtaataagaaagtgctggcgttgttatctgattcagccaatgcagagtcgcctaatccgaatgccaacgaacatgaaatttatgaccatatcaaagaaacttttgaataccaagatggccgaattatcgtggcaggtgttgccagcaacattcagcgtattcaacaggtgattaatgccgctgcatcgcttgggcggcgggttgtcttgaccggccgtgatgtcgaaaaggtcgttaaaaaccgccattcgtatgggttacatttaaaattgccggatgatgacattttaacttaaaccaaagagctaaaaggcctggcaccggaaaagaccgtcattcttgaaaccggtcggatgggtgagccgatgaagtcattgcaacgaatggcaacatcccgtcatcgcctgattcacatccatgaaggtgatcttgttttcattaccaccacgattgcccatgcgatggaaactatggcggctcgaacgaaagacatgatttatcgtgcaggcggggatgtcaaagtcttaggcgacgatattcactcttccggccacgcttataagaatgatttgcaactgatgatcgatttactcaagccagaatatttggtaccggtacaaggcgaatatcgcttacttgcagcccacgcggaaattgcgcatgaagctggcattccgttagctaacatctttattgtcgggatgggcgatattttgcggtacgaaaaaggccagatgaacgcctccggtcatgtcaacgccggcaataccatgattgatggcattggcgttggcgatatcggcaatattgttttacgtgatcgcaaaatgctggccgaagatggcattttcattgcggttgtcaccattgaccgtaagaaaaagcgcgttgtttccaagcccaaagtcacaagtcgcgggtttgtttatcttaaaaccagtcgtgacttattggccgaaagcggcaccttggtaacggagacggtacaaaagaatctggataacaaagaatttgactggacccatttgaaacaagatgttcgagataaactcagccgcttcttattcgaacagacaaagcggcgtcctgtcattttgccggtcatcatggaaattaatcaaaacagtgcaaaacggcaataaacaacaaaaaattcggatcattttccgaatttttttattgtcattgcaatatctgaataaaacaacgacaggaggaaggcatgaccaatatggtatcattacccgacaatgagcaacgtcacctgacaatcggcaaacaggcgctgcaaaagggtaactatgcttcggcggcggcgcatttagaaaaggcgtatgaagcaaagcaaacttttgcaatcgcccagccattagcggctagtttaaatgggcttaaacagtttcatgaaagtctcaatgtgatgttggcgcattaccagtcgtttatgcaaacagacggtgatgtccaactggttttggatgcttggcttggtacgcttaactttgtcatggcgcgaacgatgctgcggcaacttgatccgattcggcgccagcgttttcgccagcaaattgaggcggcagaagctttagccttgaatgaacggagcgaacaaattgcggaactggttcgcaaagtcagccatctggggggcttttcccggcaggagcagcaggatctgtttagtcaggtggggttattgccaaaagcacaactcatcaaagcggcggttcccgacttgatcgacgaatcgattccagtggcgatgcgcctgtcattgttagaccttttaacgaatgttggctatgatcaaccggtgcaatatcaggcttatgatcgagtcgaaaccattattccgagtgagttacccggcatggcggatgagccaaccgggccacagattctggatcgactgcaaaaagcattaggcgatgacgatcaggagctggggcatgctttgatccaaatggcgcgggtacagattgcctttttatatccggatatcagtcggctaattcctgaccaagcggcatttgttcaagcttatcttgatcatcatcaggggaaaaccaccgcgtttgacgatctttttgcttggcaagcggctgaaacagcgaaattgtccgaataggcgtgatgacacgttttcactgtaaatgaaagaaacttgacggtagctgtttacaaagtgaaaatgaccatgtatactcattgctggaattcatttccagcgtagatatttgttttggtatttacgctcaaatgtagtacacttaaacgtaaaggattatcagggtacacaaacaaggtatcctgtattcttacgaaaaatacaggaggttcgttttttcatggctgaaaaagaacactatgaacgcacaaagccccacgtaaacattggtacgatcgggcacgttgaccacggtaaaactactttgaccgcggctatcaccaaggtattgtcggagaaaggccttgcccaagcgcaggactatgcttcgattgatgctgctccagaagaaaaagaacgtggtatcaccatcaacaccgcccacgttgaatatgaaacggaaaagcgccactacgcacatatcgatgcgccagggcatgccgactacgttaagaacatgatcaccggtcctgcccatatggccggtgcgatattggtcgttgctgcaattgatggctcaatgccacaaacacgtgaacatattctgttggcgcgtcaggttggtgttgattacatcgttgtattcttgaacaagactgatttggttgatgatccagaattgatcgacttggttgaaatggaagttcgggaattgctcagcgaatacgattatcctggtgatgatattcctgttctccgcggttctgccttgaaagcacttgaaggcgatcctgaacaggaaaaggttatcatggaattgatggataccatcgatgaatatatcccaaccccagttcgtgaaaccgacaagcctttcttgatgcctgttgaagatgtcttcaccataactggtcgtggtaccgttgcttcaggtcgtatcgatcgtggtacggttaaggtcggcgatgaagttgaaatcatcggtttgaagccagatgttctcaagtccaccgttaccggtcttgaaatgttccgtaagaccttggatcttggtgaagccggcgataacgttggtgtcctgcttcgtgggatcaaccgtgaccaagttgaacgtggccaagttttggcaaagccaggttcaatccaattgcacaacaagttcaagggtgaagtttatatcttgacaaaagaagaaggtggccgtcatacgccattcttctccaactatcgtccgcagttctacttccacaccaccgatgttaccggtgtgattgaattgccagatggcgttgaaatggttatgcctggcgataacgttactttcgaagttgacctgatcgctccggttgctatcgaaaaaggtaccaagttcaccgttcgtgaaggtggccgtactgttggtgccggcgttgtttccgaaattcttgactaatttctgaataaacgtttaaaagtctgcaagcttgcttgcaggctttttttgtgagcgcgagccggcgcggttagaagccggagtgtaagcggccttagccgtgatggctggtctttggccattgcggctaaggtccttacacgcagacttctgcgccggggaacacgttatgggagtaagctggaacatatgaggcataatggccgggctttggccattgcgcctcagggtctttacacgcagacttctgcgctggggaacgcgttatagaaagtgagcgcgagccggtgatgattacagggttgcgtgtcaggtcaataataatggataaggaatgaataatcgcaggtattttacgtttcaagattttgacgcttgaacagccttgggaaatcaaagattattttatcgaatcatgacaccaaaaaatctcaagtcgtgtttggcttgagattttttgggctattttcagcagggattaggtaaaccaagtaactgcaaaacattagccgctctgagtgatcaaggaagggatttaaaattaagctgactgtttaatttcgcttggctgtgtcactgtaatcttggttttagctggttcaattttgtccgcttccagaatgatgttaccgatcgattgtactcggatgttgccgctgcttggattcttgacgctgacaatatcggaacaaatatcggcattgatattggtgctgtattcaaagaccaaatcggaatgaagcagtgcgcagttttttcattgttaaatgatcaacataacataacccctgattgctctcgattgtacaattgataagcgtcagattttttgtattccagcctagataagcaccattaatagtggaatcatagatagtaatgttctcacagttccaaaatgcatctttggttacaagcgtggaatgatgaatttcaacatttttagcaccatcaaaggcgtaagcaccaatcaaatcgaggtggtcggcgacaatgcttgtgctattcataccgaaatagttaccacttgcttgcacatggtcaaggctaatgtgattgcaattccacaaactttcactggcatcggaaaaatgaacgttttttaggcgaatattctggctacggcgaaaagtttttggtgcttgaattgtactatcggacatagtgatgtcattcgtataccagatgcctgaccgcgccatggtttcgaagatggtgttagccaccgtgatgtgctggctgtaccaaagcggatacttatattgaaaaattgact

SEQ ID NO: 8 - DNA, 3575 bp, LACTOBACILLUS RHAMNOSUS
aatgcacggcatgaaacccaactttgccactcatcggaaattcctgtcgctcatgtacttccacgtcctcgctttaattgcccgactgaaagaacaccaaagtctggccggtctgagtctagaacctttggcgcgcgattacccgatcgcctctaactgggcagttcaatttgctcaatggttaagccgcgaataccaaatcgaggtgccaaaaaccgaggtcggctatctaaccacccacctgctggttccacttgaacaggctcacgaaaaatggagccggcatggttatcgcattgccgtgatctgcgggactggcggcggaattgcaacgttgctgagtttacgcctgcgacggatttttcctgaggcggtgattcaaacttttggcctcaatgagttaaaagcaatccaccaactttcaccggacttgctttttaccgtcacggctttaaatgaatcatttgactgtcccgtgattcagattgatgaagtggcttcggatttagactttgcaagtttacgacacgagctatcaatggcatcgcaacatcatgccacagcgtccctggcggatttgttgcagccaacgctatttttcccagatcttcttactgcttgcgattgtggagagtgtcattgttgttcttttaatcggttttacttttgcttatcgcggtcagcgacactcccggttttttaatgcgtcaaccggaacgcggccgtacacggtccgcttcacgatcattgtagtatctatgctggtcaacgctgcggcattattcacttatgttatggcactgctgggtaactcgattttttaaagtaaacatcaaaacgagacgcctcgtcaatttgagcgcgtctcgtttttaactttcgatgttatataaaaactagtgcatcttcttaagcataaagaatttagtttttcggaaatcataaaatatttttgaaaacgcaaataattttccggagctaagatacgaatcatcacgaaccactaaactcggactgccatctgctaggttaaaaaaccgcgccggtgtgccggttatcatttcacattcaatgacagaatcaatgaaacctacttttagtcctggcttttgatcgataaaagcaaataacgaaccttttagtgcgctatccggaatttcgcctaccattgatttcaagtaataagaatgttccactaaaaaaggctcgtcgtccaatgttcgttggcgaataactgaaatgagttcagtatcttgcgccaacttctggctctcaggtacaaaagctgcctttgataatggcacaattcgctgactaatgccggttgtcttaacaattttgccttgccttgccatttctgccgtcagtccaacattattttgaagcgaaattgcgccttctacatggtgcgggcgtgcaaaagtaccactgccatgagcttgatagatataacctaggttggcaagattcttcaatgcttgccgtaacgtatatcgcgtaacctgatactgtttcatcaactccggctcagttggaagttgcccatctgcgccttggatcacgccttgttgaatatctttcagcagctgattcacaagttcttttgtgctataactgctttcccgttgtgacaacttctccactcctctatattcgtcactcatactcgttcgtaaagtcttagcctgaattataaccccatttcaatagatgaactagtcaatccatttagtggcatgtcatattaaaagacgatcacctcaaagtagcaataaaaaagccgcaagagtaaaaaaattctcttgggcttcttttttagcttaaacgtggatcagtatcactgtttatctaggcaagttcaggtgagatcctcaccattgctttggatgaccttatggaaccagtcaaaagaatccttcttacttctggcaagtgttccttttccctgatcgtctttatcaacgtaaatgacgccatatcgtttctccatctggccggttccggcagacacaagatcaataatgccccaaggtgtatatcccataagcttgaccccatcaacttcaacagccaacttcatctgttcaatatgctggcgtaaatagtcaatgcgatagtcatcatggatactgccgttttcttcaactttatcaaacgcgcccagaccattttccacgatgaataacggtacatcatagcgatcactgaaccagttaagtgcataacgaaggccaaccggatcaatttcccagccccaatctgagcggtgtaatgtcgtatttttaatctcctgattggaacccaatgttatgaaatcagtcggttcttcatcagcggctttaataacatgggacgcataatatgaaaatccaatgtaatcaacctttccggccagtaggacatcgcgatcttctaatgtgatgtccaaattaaattggcgtcgagcaaaatagtgttctaaaaaggccggatagtgtcctttcacctgaacatccgcaagataataatttgtctgcatcattcgttcagctttaaaaacatcgttgggattaggagtcgcgggataaaccggccccattgcaaccatgcagccaatcttaaagtcggagttgatcgtgtgcccgatttggacagctagtgcgctggctactgcctcataatgagccgcttgaaacatagcttgctctttgttttcgcccggatgaatgatcaatcctgaatttgtaaataacgaccattcattaagcatcccaacttgattattgatttcattaaaggtcatccaatatttaactttatctttataccggtcaaagacaaccttagcgaatttaacaaaaaagccgataagtttacgattacgccagccaccataagcctgaaccaaatgataaggcatttcaaaatgcgacaacgtaatcacaggctcaatatgatgggcaagcaaatcatcaaataaatcatcgtaaaattgcaagcctttctcattcggttgttcctcatcgcctttaggaaaaatccgactccaggcaatactcgtccggaaacacttaagccccagctccgagaaaagctcgacatcatccttatagcggtgataaaaatcaatggcatcgtggttcggatagttttcacccggttgaacgccatctgtaattcgacgtttggtttgattatctccggcggtcataacatcggcaatgctgattccttttccatcagctgaccatccaccttcaaattgatgagcagcaacagcgccgccccataaaaaatctttaggaaatgctgacaacttttttcctccttttaaatcatctaaatcaccgttaacaaaaccttaggcagccgcttcttgtgcgcctttggtttgctcatcttgatacagcttgccatcgtaaaacttaataaatgggaaccagatcccagcaaatattggttacttccgtggcggtggtttttcttctaactatgtaacacgtggtggagaacaagggatgcctgttaccatgagccggattaatcttgtcaaaggtgtcggtccagaattacagattgcagagggttttgcggta

SEQ ID NO: 9 - DNA, 2633 bp, LACTOBACILLUS RHAMNOSUS
agatccaacaaaacgtcaagaatccggggtcctgggcggggctgcattttaatattccgtgcaaactggctgggagtttaattttctgtttgaggggccattttgataggtacttagatcagctttttttaaaaatggcttgctgtaaactaactgccaagcgcggattctgatgggtggccaagtgccatgctaataaaaaatcacgtaatgtcatgctgtcttcctcctacttgaacattacgcgaatattttaagaaacatctaggatttcagacaatgtcgtaccggtccaaaactgcgccggtgaatcggcgtcacgccatgagtagctaatccggctaaatgtgctttcgtaccataacccatgttgtctttaaaatcatagcccgggtaaacccgatcatacatcaccattaagcgatcccgaatgactttggcgacaatacttgcagccgcaatgctgatactattggcatcccctttgatgagccgttcttgcggcaaattaacggggacatgcatggcgtcaaccagtaaaaactctggggcaacccgcaaatgcgaaactgcttgtgccatcgctagctccgtcgcatggtaaatattttcccgatcaatttcgtgattatctgccaccccgataccaaccgcaatggcttccgtcaaaatatgcggatacaagacatcacgttcatgcgctgtcagctgcttagaatcgttcaccggccatttaaactgatgcggcaagataacggcggcggtgacaactgggccagcaagtggtccgcgccctacttcgtctaaccctgcaacatgggaatacattttccataacttacgctcatacctgctacgatatcgtagcgcaaccgcttctgctgcttgatggtcctgtcggcgttgataagccgccaagagtttccgcgccccaatccgactatcctgctctagcgccgttaaaaccgcgggatcaacatgatcagcttgtaaaagagttttatactcactcagcgtcggcatctaattcacccggtttctctaacgtaaatcgacctaactttccttggcgcgcatcgaaaatcagccgttccgccatccgattaaattcctcaccaaatccttgcgttttcgttagttttaccaatacatcatgcggtgcagcctgcagatccgtgtcagtcagatgatatgcttttttcaacgccgccggataatgcgccataaaatagttcagtccatacaaaccaaccacatcctcctggaaaacggcgtcggcaattgctcccgtgaatgccaagcgcatcccgattgtctgggaggcaaactttggccaaagaattccgggcgtatcaagtaattgaaagttgtcgctcgcttttagccattgttgattcttggttaccccgggcttgttgccggtcaccgcgatattttttcgaaccaaccgattcaaaaccgttgatttcccaacgttaggaataccaatacacattgccttaatcatgggattgcgaattccgcgggcttttttccgcgctatcttttccgccattaacttcgcggccgcttgggggatctgctgtagccgcttagcatgttgtgcatcaatcgcaattgcagcaaagccttgtgtttgataataccgaacccattcattcgtcagtacaggatcagccaagtcctgcttgtttaaaatgataagccgcggtttatcacccaccaattcatctagcatcggattacgtgacgattcaggcgttcgagcatcaacgacttcaagaatcagatcaacttgtttaattttttcctgtacttgcttacgggccttggccatatgaccggggaaccattgaattgccaaaatatttcaaactccttttatttacaatttaaggcagcaacgtatttttgaatatagcgggctctgtccttaaagtgatactgcatgacatagcgcgggtgctctaatgggacaatgctaccaaagaaatgatacgtctgattgatacttgttagcaccttaaaattctcgccactaccaatacagtaacaaactgaggtgtctacgcctaatttgatttgctcctgcaatgaagcaactatgaatggcattagtctatccttaatcacgttagtttcataataattactatttatcacgtttcctttagcacttattttacttagtgaatggtgaaaaactctaaaagtgttttcataataggctttaccaatagttaagcgtataataagtgcaagcctcatttgcccgaaatgcctatgctttgggatttacccttgcacttatcgctgacctatcggaggaattgatcatggttaatggtcaaaaagcaacgcaactgtcacttgaatcctttggaagcgctctgggaacaccgctcagcccggacaacgagtgggttcaatatgcagaattgatcccatgggccaaacttgaaaaggcataccaattacagttctccttcaaaaaaccggccgaaacaccgaagcccttttcggaatggcttaatggcgccaaccctgatccaaatttaaaaaaaaggccttgacccgacccccaaagtttgtcgaaccaattttcccgggaaaccacccagccttttcagggt

SEQ ID NO: 10 - DNA, 9217 bp, LACTOBACILLUS RHAMNOSUS
  MISC_FEATURE (1)...(9217): N = A,T,C OR G
agcaatgttgttggccagtaacaacgccgaaattgcgcattgtgccaacccgcttgccagataaaccgacgcaattaatgaccacgaaaagtcgaccacgttaaagacgttgacataaaccgcgatcggcaccaattggcccagtcctatttgtttgtggggccaaaaggagcagggaagttagcgctggctgagtggattgcgctgcgcctattttgccagcatgtccaagacggtgctccttgtggcgagtgtcctgagtgcgagcgcatcttaaaccataatcatccggatgtgatgatgctcaaaaccagtacgcaaagtatcaaggtggatgacattcgcaacttgaaacaggaaatgagcaaaaccggggttgaaggcaatcagcgcgtgtttattgtggaagatgctgataaaatgacggcaggagcggccaattcactgctaaaattttttgaagaaccggttctggggatgacggtgattttaacggcgacggctaagaatcagttattgccgacaattttatcgcgggcacaggtgattacttttcagagtccggatcgtaacgctgtgattaccaagctggaagaaggcggagccaattcgcagctggcgcgagtggcagggcgcttaaccggtaatgtcagtgaagcgcaggaactattggcgtcagatgattttcaggatcagagaccgattggatgacataaacatcagcaccacgaacactttccggcagctcgatttgaacttctccatcggcaaaatgattcactcgagcgggcgataacggtaaacccacttcggccgcaatcttttccgcgagtggtcgattgccattgagactgaataattttaattcgtgcatcgatttctccctttttcacatttaacggtttgcaatgttattatacgagataaatcgagaaattgcgactggttatgcaatgagttaaagtaataacagaatatttgcagattcataagcaaggcttcggcaagcgtccgctttagcatttgccatgctttgatccaactgcaagactaggaaatgggaggctctttatcatgaaacaaagccatttgatcggtcttgcaccccactgttgttgtcagcggccactttaccaactgttgagcgtttttaccaataatgcattttcggcgaatcaactacattcctgatgcccgtagctccatgcgaaaatacgcctcatcatattaccgtcatgtccactgggttgaaagtcagcggcatattgaagcctggcatatgacagctccggataatcagcggcttgaagcactttggctgccgcatcccggtagtcaaaaagcggtgattatcggtcatggttataagggcaccgggattaccatgagtaactttgcccacatgttttacgacttgggcttcaatgtgttgttgcctgacgatcgtggccatggtgaatccgatggcgagtacatcagttttggctggttggatcggcttgattaccttggctggctgcaacgcattcttgaccggcttggtaacgatgcccagttattgctgtttggcacgagcatgggtggcgccacggtttcactggtcgcaggcgagccgagtttgccaaaacaggtcaaggccgtaattgaagattgcgggtacacggatgttgaaacggaactggcttatcttttaaagaagcaattccaccttccaccgctgccactggtaccactagccagcttcatcaattatcggcgcttaggttatcctctccgcgtggtcaacgtccgtcaggctttaacgcgaaaccgcttgccattactagtcatccatggcgctgaagatgtttatgtgccaaccaaaatgggccgcgaaaattacgctgcctccgctggtcccaaagcgctctggattgtcccgggtgcggcccacgccgaaagttactggattaaccccgcggcctatcaagcgcacgtgaagcggtttttggatattttcttttagcgcttgcactcctaataatagtcgtcatgtggcagctacgtttcgttgccatttcctccgcgtagccttcaaactgcgcggtttttttaatctaaaaagactcagatcgcctctgagtctttttctatcgccggatgagcggctgctatgactgccacttccgcagactattcaaattcgttttcttcagcttgatcttgctgcttgcttaacgcatcaaacgtccgcagcatctccaagttcgtctcaatactttccggccattcccaatgttgaacattaaacacatgcttgaggtgtggccccgcacttgccggccatagcttcgttgtataggtgacgtgattagcatcgaacaccttcaacaaggcttggctttgcaagtaaaagctgtcattttgcccgccaatcagcataaacggcggcaggtccaaacccttgacaacctgcgagaaattcaggtgatcggccagtgcctgatcgccgccgcttaacttgtccagataaaacgcggccatatcgctcatgtcaccggctgcttcgggaagcttacttggttctgcgactggacaaaccagcgccaccagggtgaagttgaaattaacccgactcacgccaaagagttcctgtaactccgcactctgctggatgcaggcaaccaaggacgccaggtggccgccagctgaatccccggtcaaaagcacatggtcaaggtcaaatccgcgttgagggccaaaatgcgataaccagcgcagactagcaaagatgtcttgaatctggccgcgtaaatcaacatccggtaacaaccgatagcccatacccatcactgcgtatccttgactagccaaatagcggcaataattacgattcaaattacgatcaccataaaaccacccgccaccatgaatatcgatgacggtcggcatggttgcgttgcgtcttttggccggatagtacaggttcagggtttgctgcggatcagccgactgttcgtaccgatattccgtctcccaatgaacatcttccggtacccgttcatccgcgtaccgtgccttatcccgagcagccgtttgcgcccagctcgcttgaacctttgccaacattgcctcttcatctgccattaacgaatgcctccatttcctcgtgttaacgaatcgtgttaaaaggttattcctatattaacgcaaaaagactgccggtgcgtcacccgacagtctaatcgtttgattttaagcccgttttttaacgatccttggatttaacacttgcttcaacttcatcaatcaaagcagcatcttttaacccggttacttctttaatgacgtctactaatggctgatccttgagcatcgcctgaagtttgacggcttcggcatcattaggttcaacataatggaacatcatgccaaccgtatccatcaagacgctgtaatccaaaccgcgttccttcagttcccgaatcggccggatgaagcgttcgttgtagccaagcttacgaattggcgtccgggcaactcgcgaaatatcatcggaaatatacgggttctggaaccgttgcaagacccgattttgataagtctcaagttccttttcgtcaaagtttttgaattcagctaaaagcagtgaacgggtttcggcaagcgcacctttggcctgattaaagactttaggatccttgatggcttcaccgatcgtggtgtagcccaagtacttgccagtgtaagccgtagttgcgtggccagtgttgactgagaagagcttacgttcgatgtatggttcgagatcaggaacatagtcgacggtcttaagcttcagatcatggttcttcatctggctttcgtcaacaacccattctttgaagtcttcaacactaacggctaatggatcatcatgtttttgctgcgggacaatgcgatcaaccgctgcattagggaagccaacgtacgtatcagcaaaggtcttgccggcgtcatcaagatgttcataaacgctcttcttcagcgactgtgatccgccaatcatgttctcacacgcaatcacatctaatggttggtggttgttagcggccgcgcgtgcttgcaaaccttgagcaatcagcggcgcaatgatcgggagaatcttcgggccaatcgccgtcgtaaccaagtcggcttgggcaatagctttcacaactgcctcaggatccttggcgttattcaacccgtcaacattgtccacatgaattttcttttcacccggggcggccaaagtgatggtgtattccccacgctgatttaacgcattgataatcgtctcgttaacatcgacaaaattgattttgaatccattagcggcaagcgtttcaccgataaagccgcgaccaatattacctgcaccaaaatgtactgcttccatcatgatttattcaacttccttcagtaaattgacgatttcttccggcgtttgtgcgtcggccagtttttgaacattttcaacatcactacaataaagcgcaatttgtgagagtagtttgagatgctcgccgtttaatccggcaatgccgaacacaacggtcacgagattctcatcagccggatcatccgaccagtcaaccccccacggatattgaacgaccgagataccggtctttttaatatatttcatgccgtcttcagtgccatggggaattgcaataaagttacccatatacactgaaacgtcacgattacgatcaatcattgaatcaatataacccggttcaacgttgccattgtcgaccaagagctggccggcctgacgaatggcttcttccctggtcttggcttcttgaccaagtttgatcgtctttacatcaagtcctttcatcatgtcaccttcgatcaattttttgaatttcgtgcataaagacttctgtcatcacttgatataactgactatagtggcctttttcaaaaagctgtatgtccgctggtgaggcaactagcttggcgctaactgcactcaggagggtcaatgtttcttgtggaacaggattcggcgtcagcaacaggagaatccgctgcagttggatcgtgcccatgtccattgccgctaaaggtatcgctgttttgagatcaaacgccccgatatatggggttgtgacaccgcgactactcgtgtgaatcattgctaaacctgtattcgggatgccaaccggcgctaattccaatctttttaacagtgcttctttgacaattggcggttcaacgacaacggtcggtaactgggcaagcatcgcatcgatagcagcagcaatcgtggtggccggctcattcaagtcgttgacggcaaagtgttgtaatagcccatctgctgccatcaccatggtttttaggctctcaaaggcggtaactgtttggtccagtgacggttgattcaacggccgcacttgtttaggtgtggcgcgctgaacaagccggcgcacttccgctatttcctcgcgtcccaatatcggcgtaatcaccaagtactgatgcttaaaccccggcagcggcatggtagcaaggaccagatcgtaatattcaagttgttgttccggtaaatcactcacctgaacaatcttaatcttacggatttccggtacctgcacacgcaactttccagcaatcaagctgccggttccgggtccatcactagtaaccaatagcaccgcaacgggcttttctgctggcgcgtgatccaaaaccgaagcgaagtataaaaccagataggccagcgcatcgccagtgaaggctccttggccgaaaacatgatcagctgccttttgaaccgcttggtaaagttcaggataatcatcttgcaaatgagcaagtacgggattggtcattgtgacaccagacagccaatcccctccagccgttcgttggacatgagccagtaatgaggaataaagctgtgtgttcccggaaaatttcccgggaaatgatcgggctacttcccgaataagatcctgaacttcaaggttgatggttaaatcaaattgatcaaccggttcgcctgccaacccgccgcgaatattactcagttcgatggcaaggaattgataatcaccgacacggactttttcgcggattgtcgaatccatctcggctagaaattgtagcgccagttgttgatcctgaaacagtcgttcctgatcaaaatgctgctgcggtttaacgtgatggtcctcacgcaatcttcgtgtattaattgcaaccgttagtagcactgctttacgttgattgtcatttagatccgctaaagctttaatctgagacagtgcggtgttagcagcaagtaattcttcttgcggtaaccgttcaatgaaatagttcgtcaccggatcaaagtcttgctgcggatcgtttaggaagcgaaagaacacatacggattaatttcagcattcaagacgccgaccagaacccggcgaatatcaccttcttgtccttcaatccagataccagctgctttttgccgattcagcttgagatgatattcatttaacgccggttcgagaatatccagatcttgcttaatcgtcgtaatactgacatctaccgcatcagctaaggctgtcatcgtcaaagtttcatccgttgtcagcaacatcagtgttagtgcactctgcctctgactgggatcaaaggtgagatcttgccgttgatgtgacaaggctgcagatagactggctaaatcagcggctgctcccacaatccggtatgagctgccattgcctttgtccaatttcaaattcaccgttgcgatatcatgctccagttgcgaaagctcacggtaaatggtccggcggctgacgcccagctgtcgctccagctcgtcgcggcttatgccggcgggctgactcatcatcagtctgatcatttcctgttcacgattcgttagtaacatgtttttcgccccagacggccgcaactcgacctcgcttatttcaatttctcaataagtttatcatagttcgtcgcgttcaaaagaccatccacggtatagacttgaacattggcaaattgtaatttaacacgccgggcagtttctttcgatgcgatgattaagacatgatccttatcatcaatctcaccgatcgcaacattacgaaccttgacgtctttgttgagttttcgcaactcagagcggaatgtcgcttgcgccatagttgccgagccgatattttgatcatgatgcaggaagtctacttctgtaatcttatcgaagtcgatatcgttaagctcgtcttctggcgtttcctgcttagcttttggcgtttctttggttgtggtttcatctgtcccgccaactgcttcagccttcaaactagcaatgatctcatcatacttaggactattcaagaagttctcaacagcgacgtgtgctgcatcaggtgtttgtttcttagcccgatcagccaattcttcttgcgtcacaactaagagtcccggtttatcctgcaagttgctaatggccgtgttggtaaccgacagatccaaaccagcctttttgactttatcgcgcagaattgaagcacccatagcactggagcccatgccggcatcgcaagcaaagataatttgcttaatgcctttagcctggctcatgacatctttagcagcagccacatcctgacctttagcttcagctttcatcgacttcatcttcgcttcactggctgccaactcatcgccagtacccttatcgcggcgcaagatgaatgccgaaatcaggaaggaaacggcagtgggcaccagtaaccccaacgattaagccgatatagtttccgatatcaaccggtgacatcgcgagcaacgataggatggagccgggagatggcgaactctttaagccaacattgaagattgagaacaaggtcgtcccagtcacaccaccagccataactgacaggaacaatgccggtttcattagaacatatgggaagtaaatttcgtgaatcccacctaagaaatgaatgatgatggctgaaggtgcagaacctttggccgcacccttaccgaataaggcaaatgcaagcaggacaccaagccccggacccggatcaggttcaagcaggaacaggatggacttaccatgttcggctgctgcctgaatcccaagcggtgttaagatcccttgattgatcgcattatttagaaacaggatcttagctggttcaataaaaatatttgctaaccataacagaccatgattgataatccaatcaacgccggctgccattgcgttagtcaagccggaaatgatcggtcccattaagaagaagccaacaattgctaatagcatcccgataatgccggcactgaagttattgaccagcatttcaaaaccttggcgaatcttgtcttggacccgatcgtcccatttcttaatacaccagccgcctagtgggcccatcaccattgccccaatgaacattgggacattggttccgacaataacccccattgcagcaatggcgccaacaacgccgccacggtgacctgctaccattgaaccgccggaaaaagcgatgagcaatggcaataggtaagtgaccattggcgtgatcatttttgccagttgcgcatttggcagccagccacctttaaggaagatggcagtaatgaggccccaagcaataaaggcgccgatgttaggtaacaccatgccggaaagcttggtcccgaatgattgcataccggccttcagattgaatttcttcttctctgttgccggcgtgtttgctgatttagcttccaaagcaaacactctcctttcgcttgtttacgaagattattgtaaccgctttatgtaatcgctgacaaaagctactttggcacagttagttgtgccaaatattcagcatcaatcccatcagcactatttgtgggtcaaaataatacgtatcagatagtaacagtattcgttatctgtttcacaagttatctaaacctcgacgctgttggtcgccttcaattaagccatgtggattgctttttgaaaaagaaaaatcagtttctaccatataaataaggaacatctcagtgctatttcagctgccagcgttaatcataaagccacgctccttcgtgattcggtttacaatgtgacggcgatttagtcacagcgccggatttttaaaagaattcgattgcnagcttctagcgacttcagttnntcnncnancggnncttcaatccctnnnnccccgc

SEQ ID NO: 11 - DNA, 4998 bp, LACTOBACILLUS RHAMNOSUS
aggaatcaaacagccttcaaatattagctaatttttgtatatttgtttataaaatggccaaaataaaaaaacaaataatcgatcattgaaaaatttttttgccgcacattaaaaaaatatggttgacaatttttaaaatgtcgttatgatgagagtcacattaaatcaatagccatgaagttgtgattagaccaagtaggttggcaccaatccacagagagcgccgattgctgagaacgcgtgattgaccgactgaacacacatctaagaacttgatagccgaaccgagtaagctatcacgcacctgttgcgttatcaccgctgccaataacagttcgcgcaagccgacatgggattggtagatgaggtttgggtcgtaaggtccagacaaattgaggtggtaccgcgaagttgattcgccctcgaaaacgttaaaaaccgttttcgagggcgttttttttgttgaattcgtttcgatttttcccaacaaaacgtgcacgcgatcacttaatgaccacagcttcgtgcaaacggaaggagcaaccctatgtcaaatcgacacttaccagtcggcacccgcgatgaattcggtccccgggcgattcgtaaagaaaatctcattcaaatgatgagccaccgattcattgcttcagggtatgagcgcgttaaaacgccattattggaataccgtgatgttttccagccattgacggttcgcggtgaacaaccttaccaaatgttagatgatgccggagaggcggttgtgatgcgtcccgacctcacattaccgttagcgcgtttactgagtaccaccagcattcagcctcctgttcaatggtggtatgtgggagacgtttttcgcgtccgaaaaagcttaagtggtacctataaccaaatgacacaagccggtatcgaattaatcggatacgcctcgataaaagccgaatgggcctgcttgagtgaagcaacccggatctgtgaagacttgggattaacggacctaaccttggaattgtctgatgtccagttcgtatcgcaagtcatgcaggcattaccacttgatccagcgacagcatccgcattgcaagcagcatttttcaaaaagaatctcagtacctatcaacaactcattgcgccattacgtgcggaaccgttatacccattcttgcagcaatggccatggttgttcggtgaggctgccacgattttcactcagcttgcccaactgttgccgccaacgttactgcacagtcgcctaaagccattacaacaaactgttgcttttcttcaacatcaatttccccaagtcacgataaccgttgatttaaccagccaaccgccacaatcttactacaccgggctctttttccacgcctacgccagtgatagtcgtcaatatctgtttagtggcggacgctatgatcaactgttggccagctttcagcaagacctgctgccagctgtcggcttggcctttgatgtggacgccttatccgatattttgccggatgatcccaaaccggccctcacactggtttatggccgtccgtctcaatggcaagaggccgcggcagtcgttgcgacaaccccgcacgcacaactttgcctagtcgattcgcttgctgaagccaagacgatggcgcaaaagtatcacgccaaattaatcgatttatccccaaaggaggcaatgcaatgaccctcacaatcgccttggcaaaagggcgcacgaccactcaggttttgccattactcactgcagcaggcattgactgccaggcactttcgactaaaagccgccgtttgatttttaccgaaaaccctgactaccactttattcttgtcaaagccgcggacgttctcacttatttgaatcgcggaaccgttgatatcgggattgtgggttcagatgtccttgaagaacaaggccatcagcagtttgacatgcttgatcttaaaaccggccggtgccgattcatcctggcttcaacacccgactttgatccgcaaaaaaccaaacgcaaactgattgccaccaaatacccccatcttgctcagcgctattttcaaaaccaaggtgaagatgttgagattatcaagattgaaggatcggtagaattggcgccgctcacggggatggcagatgccattgtcgatatcaccgaaaccggcaccaccttacgcgaaaacaacctcaagatttttgctactttaacgcccgtttcaacgcatctggtggttaatcgattagcattaaaacaaaaaaagccggccatttaccagcttattcagtcgctacaacaagttcgtcctcaggaggcttaacatgaaaattcttaccggtaccttaaccgagcttcaacaacaagtgaccacccgccagcaaaccgttgcccagaatccggcagtgcagaccaccgtccaaaaaattctggcagacgtcaaactaaatggggacaaggctttacttgcctacaatgccacttttgatgatgttgctatctccgacctccgcgtaccacaagcgcaaatcaatgccgcaatggctgatctctcgccaaaattactggcagcattaacccttgccaaaaaaaacatcaccagttctcaccagctagaaatgagccaaggctttattgatagcccatatcccggtgttatccgtggtcaaaaactaacgccactagccgcggtaggtttgtatgtcccaggcggcaccgcggcttatccctccacgattctgatgaccgcaattccggctaaactcgcaggggtcaagaaaatcgtcatggtaacgccgccacaagcaaaaggtttaaatccagctgtattggcggccgcaaaactagcaggggtggacgaaatttatcaggttggcggtgcccaagcgattggcgcattgacttatggcactgaaagtattcccaaagtcgataaaattttaggccccggaaatcgctacgttgctgaagctaaaaaacaggtttttggcgatgttgcgattgatatgatcgctggcccatccgaaatcggcattattgctgatgattcagcagatccggtacgggtggcagctgaccttttgtcacaagcagagcacgatccaaacgcgcgcgcaatgttggtgacgactagtccagcgctggcagatgccgtcagtaaggcggttgactcacaactgctaagtttgccgcgtaaggcgattgcacaagcagcgatcaccaaccaaggttttatcgcgattgttcctgacgtagcttctgcattttgcttaatgaataccatcgccccggaacatttggaaattcaattacccaatccaatcacttatctcaatgaaattcacaatgccggttccgttttcttaggtgaaaatgccgccgaaccagttggcgattatgttgccgggccaaatcatgttttgccaacagccggatcggcacgatttttctcaccactgggcgtttatgacttcgtgaagcgtactcaattcattcaatatagtgccgcggcattggcaactcaagcagatgcaattgtgacgctggcacaaactgaaggactggatgggcatgcggaggcgattttgaaacggattacgcgttagagcatgtttttatgagttgaaatgatgttttaggacgcgctcccccgacgcagaagcctgcgtataaggaccttggtcgcaatggccaaagcccggccatcacgcttaaggccacttacactccgacttctaaccgcgctggctcgcgctctcaccataacgcgctccccggcgcagaagtctgcgtgtaaggaccttggtcgcaatggccaaaaccgggccatcacgcccaaggccgcttacactccgacttctaaccgcgccggctcgcgctcacttttctaggaggtttatcatgcgtacagcaacgatcactcggacaactaaggaaaccgcgataacgattagtttgaaccttgaccagcaaagcggtattgatattgataccggcattgggttcttcgatcatatgcttgatgcttttgctaaacatggacgctttggtttaatcgttaaagctcaaggtgatttagacgtggatccgcatcatacgattgaagatacaggcatcgtcttgggaagttgctttaaacaaacgctgggtgacaaagctggcatcgaacgctttggcaacgcatttgtgccgatggatgaaagccttgcccgcgtggtggtggatctttccgggcgtgcttatcttgtgtttgatgctgaattaaccaatcaacgactcggaggatttgatacggaagtgacggaagattttttccaggctatggcctttgcaggtgaattcaatctccatgccgctgttttatacggggcgtaatacgcatcataaaattgaagcgttgtttaaagcattgggccgtagcatgcaggcggcggtggcgcttaatccggcagtgaaggggattccctcaaccaaaagaagtgatttcatgattgggatcgttgactacgatacgggcaacacgttgaatgtcaaaaaagcgcttgattatctggctattgacaaccaactttcagctgatcctacagtcattctggctacaaccaggtttaatcatgccaggagtgggagcttttaaagccgccatgtctgcattgacccaacgcgacctggttccgggttatccgtcaatttgcggctaccggcaaacccttactcggcatttgcctgggaatgcaattgttattcgatcgcagctttgaattcggggaaacagcgggactgggcctcatccctggcacggtggtcgcaattcctccacgagcaggattcccgactccgcacatggggtggaacaccaatacgatcacccaacctgatcgtgattgtcggcttgctcatggtgatgtactactacaaattcaccaagaagctcgtcagaatcatcatgataccagtcggctggttcgtgaagccagaaaagaagatggcgatgcagctt

SEQ ID NO: 12 - DNA, 10180 bp, LACTOBACILLUS RHAMNOSUS
aggacatttgctgaaagttctgaatggcccgcgaatccaagcttgaattgaagattgacgaaattaaatagtaaaaaagcgcaaagcacggctttgaacgagaatggtaccgccttaacgggtgtctcgatcaaggcggggcttttttaatattctggtaatcggcggtaagtggaggtagcgatggtgaaacggatgctgcattgtaaacggttagttgtcaaaatagggacgagtagtttgattcatcaaaatggcaaggttaatttgcagaccatagatcggctggcgtatacgttggcggctttgacgaatcaaggttatgagctggttttagtcacgtctggtgcgattggggttgggatggccaagcttggtgtgacggtgcggcctgctgaaattgctcagcagcaggcgttggcggcgattggtcaatcagagttaatgacgttgtatacgcaaaggtttagcgattatggcgctaaaattggtcagttgttgttaacgcatgacgtttttgattatccgcaaactcggcagcatgttttggataccatcgatgctttgctgaagcggcaggtgatgccaatcattaatgaaaatgatagcgttgcggtggatgaattggatcatcgtacgacttttggcgacaatgaccaactttccgccttggtcgcgaagcaaatcggagcagacttactggtggtgctttccgatattgacgggctttatgatcgcgatcccaatcgccatgcaaacgccgccttgatcccggcgattacccatgtgtccgctaaagttttggctggcgcaggaggcagttcaacccggtttggaaccgggggaatggtgacgaagcttaaggcggcacaagtgatgatgcgagcagggaagcacatggttttaacgagtggtcgtgacccacgcattattttgcgagtcgttgccggcgagtcagtgggaacatggttcgggacagaacttgagcctgtgccatctgaagttcacgcggctaactgatgtttaacgaggttgctgaacgaacagtctttaaaaaaacgaacggttgcgcctgtcagggtacaaggaggacgattaaaaatggatgtcaccacgattgatctggaacaaatgggccgagcagcaaaggccgcggcgactgtcttgagccagttgacgaccgcacagaaaaatgccgggttgttggccatggttacggctcttgaaacgcatactgaaacaattttgggagctaatcatgaagatctaaaagcggcagcaagcttgccggctaagttcacggatcgattggtactgacagccgagcggattgctgacatggcagcaggggttcgccaagttgccgccttacctgatccaaccgcccagacggataaggcctgggtgaatcacgcaggactgaatattgcgcaaaaacgggtacctttaggggtggtcgggatgatttatgaggcccggccaaatgtaaccgttgatgctgctgcgttaacttttaaaagtggcaatgcggtcattctccgtggcggtaaagaggcgctgcacagcaatttggccttggcgaccgttttacaggctgcattgaccgcacaaggattgccaaaagacgcgattcaattaatcacggacccgaagcgagaagtcgcgaatcagatgatgcacctgaatggctacattgatgtgctgattccgcgtggtggccgagggttgattaaagcagtcgttgaacaggctaccgtaccggtcattgaaaccggggcgggcaattgtcacatttatgttgatgcgtatgcgcaagcccagatggcaatcgacattgttgtcaacgccaaagttcagcggccgtctgtttgcaatgcggccgagaaacttttaatccacgctgatgttgcaaacgcgcagctgcctttaattgctgcggcactgcaagcgcatggtgtcgaattgcgcggtgatgaacgggcgcgggcaattgtgccgaacatgcagatcgccacggaagaagactgggataccgaatataatgacttaattatggcggtcaaggtggtggattccgaggaagaagcgattgcgcatatcaacgcacacaacacgaagcacagcgaggccatcattacggataactaccaaaatagtcagcaattcctccaacaggtagatgcggctgttgtctatgtgaatgcctcaactcggtttacagacggcttcgagttcggtttcggcgcagagatcggtattagtacgcaaaaattacacgcacgcggaccgatggggttagcggcgttgacgacgattaagtatcaggtgctgggtaacggacaggtacgcgaaggttagttcaacaattaagcgaaaacgcaggcaagcacaaggtcttttcaacgtgcttacctgcgttttttggtgttaccgggatacccacttttttatagtagactggtgaaaaccgaagatgaccatcgttaacatgagggctaacacgccacatgcaggaaatccccataaaccgccagcagcatccatgacactgccagcgtataaactgccaatcggggttgatccttgattgagcaaaacgtaaacactcataatccgcccgcgcagttgattgggaatgccaaattgaaacgaggcgttggactggttcaggaaaaccatgttacaaaagccgatgagaaccatgagcagcatggcaagccagtagacatgaatgaacagcatggacgactgaatcaaggccgtgccgactgctacagccaaataaagatcccggcgcaggccgaagctggcaagataactcatgagaaaagctgctaccagtgagccgacaccagtagcagacaaaaggctagcataaccttgagcgccgcggtgcaaaacctcctcggcatagatcgggatgatgacgttattgttgaagtttaatgtacagatgaccagcatcaattcagcactgagtttcacgtctgcatgatgcaagatataactcaacccttcccgaatatctaataagatgtggcgtgaacgatgactggcaataggatgatcttggtgaatcattaacaaaccggcaataatcgccacataactaagcgtatcaatcagaaaacacggtgccacgcccagcgtcaccattaagatacctgccagtgacggaccggcaattttagccaaattgaaaatggatgagtttagcgaaatgccattaattaaatcttttttgcctacaagttcaataacatatgattgccgcgttggcgtatcgaaactctgaaggatgccatagcccaaggcaatcgcgagaatctgccaatactggacgatcttcaaataggtaatcaacgtcatcgtagcacccaacagtaaaaagccgaattgggtaaacaaaagaatttgtcgcttggggtagcgatcaatcaatgttccggcgaccaaagtcagcgccatgatcggaacaaactgtgccgccgctagcaaaccaactagaaaagcggattttgtcatttgatagacaagccaggtttgcgttgttcgctgaatccaggttcccataacggaaatacattggcccgtccaaaatcgacgaaagttctttgaacgcagcgaagaaaaggttgctgcgaaaacgtgtcggttcatttgatcatcaccttgccttgagacttagaacctgtctagtatctgctgaatctggtagaattgtggaaaaccgactgaggagtttgtcatgccagattatccaagcaatatttctcgagcgcaatttgcgttaatacaacctgatttagaaaacttccgcaagcatacaagaccgcgtcgttatgatctttatgacgtattcaatgccatcctttactcgcttactacagggtgtcaatggcgtgaattaccgcacgatttcccggaatggcacactgtctaccgctattacgatatgtggcgagataaaccagacccgacagctgattcgctattagaaaggcttttaaaaaaactgtcgcttcctatcgttttgcacagggccgatcggcccgaacgtcgtttgtgattgttgatgctcaaagtgttaaaaccactgatttaacgaaaaatagtggctacgatggcggcaaaaagatttcagggattaagcgtcatatggcggtcgatattaacggtttaccacaagccattctcgtgacacgagctaatgtagtggatggtgaaaaactataaaagtactttaataataggatttaccaatagttcggcgtataataagtgcaagcctcatttgcccgaaatgcctatgctttgggatttacccttgcacttatcgctgacctatcggaggaattgatcatggtttatcgtcaaaaagcaacgcaactgtcacttgaatcctttggaagcgctctgggaacaccgctcagcccggacaacgagtgggttcaatatgcagaattgatcccatgggccaaacttgaagaggcataccaattacagtttccttcaaaaaccggccgagcagcgaagccatttcgattgctttatggcgcaacgttgatcaagttgaagaaaggcctgaccgaccgccaagttgtcgacgatatccgtgatacaccagcctatcagtacttcatcgggttacccgaatatcgcgctaagaagccatttgaacacacaacgttggtgcactttcgccaacggctttcagccatctcagatttgatccgcaacattactaatgacttcacgcgcgagcggttggaggccgatctacctgaggggacgcatgttttgattagtgatgcgactgccgttccggtcaagatcaagtatccccaagatacaacgctgcttaaccagagtcgtttgaatctcgaacaaatggtcacagatctggcccacgggttaggtgtggaaattccgcggacatacagacgtgaagcaaaaggtaagtggaccgctttttcgaggaaaccgcggcgtcaaaacaaggaacgccgcaaacagcttcaagctcagctacaatacatccgaagagatcactaagatgacaaaaagatttcttaattggtatactttttgatgtacttgttagactagctcacattaaacgttgacgcttgttggaacacgcatatactaagaacgtaaatattggtatatgaaagggagttcacaatgcgtatcgaggaagattgtattggcaagctggcagtagatgaggatgttttatatgggatccacacgacccgcgcactggcgaattttccaattagtcatgaacggaccgatgctttgctttttaaaagtctgattatcattaaaaaggcggcggcgcaagtgaatgctgctggcgggacattgtcagccgctaaagcgaaagcaattgttgcggcatgtaacagcttgttgatgggtgaacatcgtgatgcactggtggcgccggcgattcaaggaagtgccgggacttcggttaatatgaatgttaacgaggtcattgccaacttggccagtcagcataccgctgagccggtgcacccgaatgacgatgtgaaccagagtcagtcaacgaatgatacttatcccacagctgggaaaatggctgctttgcaagctttaccgccattgcagcaagccttgacctttttaattaagtcgttgttggtcaaagcggacgagtttgcgaacgtggttaaagtcgggcgcacacaattgcaggatgcagtgccaactacattcggtcatagttttcatgcgtatgccagtttgttccagcgcgaccaaaaacggctgacgcgagcggcggaagatttacgccaggtcaatttaggggggacggcaatcggtaccgggttgaacgcgactccttattatcgcgcgcacattgtgtcccaggttaaccggctcattgacttaaagcttaaagataatggttactatacccaatatttacttgccgatactgtacaactaaaaagcaaatatgcgattctactctacaagctaatgcgcgaagctgacaaagatcacggtcagaccatttccattgttcaaggaacccctgatgaatttaaaacatggcttggcgcgccaaaatcgtatacatatggtcgcttgaaagacaaaatactaaagccagccattgatgaaatcaatctcaaaataaatgatttagatttaaacttatttcaagcaagacgcggccgacaagttgtccaagttgaaattcataataattttctgcgcagatatccaaggacagatcagtaaatgcaattaatcaaaatatatgttaaaatatcgttaatcgaagaggctcataaacatcactagaccgtgtagtccgcaagctacacggtttttttgtctcaaaaagccatcacctccgcaagaagatgatggcccggtgccaagcactgaactcggccgctacttactctacttgcgattgttcagcttgtcttctaccaagagcagaaagacaccgacaagtaaaggcgcgatgatcaatatcggtcgcaccggtattttagcgcaggatgagctcggagacctagataaagtcaacaagcaggcgttgtttgatgtggttgcggacttacctgattttatcgtcggcatcaaggcccgtgaaagccattcggtggtgattgataatggcatcaagccactattggcggcaagatcatatgcggctttgctcggacatctgccgattatggtgcatgtcggggccaatccgcctgaactcaaagatattttgcaggcgatgggcacgggggatgttctgacgcatgcttataacggcaagccaaatgggatgattgatgaaaacggtgagatcaaggaattcgtctatgatgcatatgaccgtggggttgttttcgatgtgggccatgggacagattcgtttaattttaaaaccatgcagattgcccgcgatcatggccttgatcctaaatccttgagcacggatatttaccaccgcaatcgtgaaaatggtcccgtttatgacatggcgacgacgatggaaaagatgttgctgctcggctataccttaccagaagttattcggatggtgacttttgcaccggcggacaccttccatcttttgaataaaggccggttgcgaccaggaaaagatgcggacgtgaccatttttaacctaacaaaaggtgataaggtattaacggattctaatggcaacacaaaaaccggccagcaactcatcgcgccaatttacacagttgttggcggggcggtttacgatttggaggaacaacacgcatgacagattattacagcacttacgatttgaagcacgtgatcaacgctagcggtaaaatgaccattctgggcgtttccaaagtcccggaggccgcgattcaggcgcagcagtttggggatacccacttttttgaaatgaaggatctggttgataaaactggcgcgtacattgccaaaaaactgggaactgaaggcgctgtggtggtgaactcagcgtcggccgggattgctgaagctgttgccggaattatcggtgaaggtagtaagtatcatgtttatcatccgttttcttcgcggtataccaagcgtgaaatcattttgcctaagggacagaatgttgattatggcacgccggaagaagtcatgattgaactcggcggcggtcaggtagttgaggccgggtatgccaatatgtgcacgccggaacatgtggagatgatgatcacagccaacactgcagcaattttctatgtgaaaagtcatcacgcggtgcaaaaaagcatgctgacaattcaggaagccttggagattgctcatcgccacgatcttccgttgattctcgatgctgcggcggaagaggatttgcacaagtatgtcgaaatgggcgttgacgtggtgctgttttctggggccaaggcgattgaaggcccagcgtcaggcttggttttcggcaaggagccgtatatcggttggacgaaactgcaaggacttgggattggccgggccatgaaaatcggcaaggaaaatctgctcgggtttaccaccgcacttagccaatatctggatcacggtccagagtccggtgacgcgatgaagaagcggctacacccattcgtggccgctttgaatgaggtgtcacacctgaacgtgaaggaagtccaagatggcgccggacgcccgattttccgggccgcggtgacggtagaagcctccagtcccaagaatgccaagcaggttacagccgaactaaaggtaggggatcctcgaaaaacgtatctagactctcttctgactaggccctatatgatttataaagatagaagccaagggccaaagctctttaatctaatcaaacaaatatggcaaggtcgaactgttttgctggttgagggttctcagacacgatttggtattggaaacgatcttttgaagaatgccgcatcaattaaaaggattgtctgtccttctgaaaatgcttttgaacgatacgatgaaattttagatgttattgttcgtattgtcgagaagcttaaggatccacttgattggtggagtcggtaccaaaaccaatcgtcttttcgccaatccggtttttgacaatattttcaataccgtcaaaggcaccgccgacaataaagagaatattagtggtatcgatttggataaactcctgctgcggatgcttacgtccaccctgtggcggaacattggcaatcgtaccttccaagatcttcaacaaagcttgctgaacgccttcaccggaaacatcacgggtaatcgaaacgttctcggctttcttggcgatcttgtcgatttcgtcaatgtaaacgatacccttttcagcgcgctcaacatcgtaatcagcattttgcagcaatttaagcaaaatgttctcgacgtcttcgcccacataaccagcttctgttaacgttgtcgcgtccgcaatggcaaatggcacattcaggatcttggctaatgtctgcgccaagaatgttttccctgaaccggttgggccgatcagtgcaatgttactcttttggagttcagtatcgtcttttgtcgcagtctgcatctggttaacgcgcttgtagtgattataaacggcaaccgaaagtgcttttttcgcagcatcctgcccaatcacgtaatcattaagtgatttcatgatttcgattggcttagggacttcgagtagattctgataggcttcttctttaaattcttcgtcaatgatctctttgcagaggtcgatacattcattacaaatataaaccccagggccagcaacgattttcttcacttgatcctgagacttgccacaaaaagagcaggtcaccggacccgttgtttcaacgttgtcaaacatctaattcaaccctttcttgttaccttcattctaccagaaccgtcaagtaccgactagcaactaaccgctatgccaatgtcaagggatctgttcggctttttggacctgttaagacgacaaaagagacgatcaaggatcgtctctttgacgcgactgtgacaactatttagctgacttcttgtcagaatcagccttatcagctgtttcatccttggccgcttcgacctctttggcattgtcagtaatgatgtcgatggcttctttaaccccaatatcgtgcttgagcatatcttcactcaatgcctgacgaacggctttttcatccatgttgtattcggaagctaaattcttaacttcttcggtcacttgatcttcagttggctgaatatcttctgccttaacgatggcttcaagaaccaagttagtacgaacccgagtttctgcatcggcttcaaactgtttatgcagatcttcttcagtcgtaccagtcaattgatagtacatcttaggactgataccttggcgctgcatattgcctaggtattgatccatttgattatgcacttcttgttcaatcatcgcatttggcacttcttcgatcgttgcgttctcggtagccttcttgatggccgcttcctgaaccgcattcttggccgcttctttacgctgatcggtcaattctttcttgatcttgtcttttaactcagccaatgtatcgacatcatcatcaagatccttggcaaagtcatcgtctaattctggcaattccttgaccttaacttcatgaatggtggtttt

SEQ ID NO: 13 - DNA, 1638 bp, LACTOBACILLUS RHAMNOSUS
aggcggtgaaggttatgtgcggatttcgtatgcggcctcgatggcggatttgaaactggcggctgagcgcattaagcagtttatggcaacgcattaggtaggcaggtttgcagttggacgataacgcgctcaaaggggaatgatgatgaagaaaattttaatgtatagtgttcgaccagacgaacaaccagcgattgatgactgggttgctgccaatgatcttcaagttgataccaataccgttgccttcaatgctgatacggttgatctggctaagggctacgatggggttgtcattcaacagcatggcgccattccagaaccgcttgtttatcagaagttgaagtcattcgggatgaagcagttgactttgcggattaccggctatgacattgttaatctcgatgctgcgactgccaatggattagccgtgaccaatgtgcccgcatactcgccgcgatcggttgcggaactggttttggctcatgccatgcgattgattcgccatttaggtgaggctacggcacgcgaagccaaagatgattatagctggggtggtctggaagcgcaggaagttcatcaattaacgattggcatcattggcgctggcaaaatcggcagtaccgtcgcccgcatttttcgcgccttaggatctaccgtcatcgtggctgatccggtaacgcgccctgaattggcggatacggttcgttatgtcgatcttgacaccttactggccacggccgatatcgtcaccgtgcacacaccgctggacgacatcaccacccatatgcttgatgccgccgccttcaaaaagatgaaaaagacggcttacttgatcaatgctgcccgcggaccgattgtcgatacgaccgcattgattgaggcgctgcaacgtggtgaggttgccggcgctgctttggacacaattgaaggtgaagccggtatttttggggttgatcgcagccaatctggcgtggacaataccaatcttgaaactttaaaggccttgccgaacgttgagatttctccgcatatcggtttttatacggatgcagccgtgaaaaacatgacctataacttattggatgacgtaaaaaccattttacgccggggggcatttaccgaccaagttaattaaacggaggaagacgacgaaacaagatgtaaaaaccgtgacgatgaacattttaaacggtttatcagttgggattattgttgccttggttcctggagcgattttaaatgcgctcgtcaagttgcttttacctagctttccacaattggccgttgttacgtatatgacgaccgctgcgatgaccttgttaccggcgttatcggctgtgtgcgtgggaatgctggcgaagtttacgccgattcaaacaagttcgctggcactggctgccattattggtgccggtaattatcatctgaccaaaaccggcttgagtgttgccggaaccggggatgtgattaatttggcgatcaccctcgccattggctatttagtcattttattgttgggcaatgcgctcaaggcgtacacgattcttctgattccatcgttagtattgctgattgcaggtggggtggggatgctcaccctcacaccggtttccggaatcacgaagtatattggcg

SEQ ID NO: 14 - DNA, 8885 bp, LACTOBACILLUS RHAMNOSUS
ataggcaagggcggattttttgtttcctcctcggcctcaataaagtttgaagtcaaaatgctatatcgggttgcccgactaaagaattcgcttgagtatcaacatctgcatttattgttattttgggaggaacgttatgtggaaagttattaccgatgcagttccgcaaatgatagcagccggcattaaatacaccattccaattgcactcgtgtcatttgcgatcggcctgatcatcgcacttgtaaccgcattgacgcgcatatcggttcgtaaaggtattttgatccgaatcgcaaaaggaatcgccgttttttacgtttggctctttcgctcaacgcctttgctggtgcagttattcatcgttttcttcggcttacccagcctcatcatcccgggtattttcccgcatggcatcaagttagatcccgcggccgcgggaattataacattctcacttaacacgggggcgtattgtgccgaaacgacccgcgcctcgctgttgtcgattgattccgggcaatgggaagcggcttatgcaattggattgccgcggcgactggtgctgcgcgaaatcattattcctcaagcactacgaacggccatcccgccactgtcaaatagtttcatcagcctgatcaaagacacatcccttgctgcctcgatcaccattgtcgaaatgtttcaagtcagccaacaaatcgcggcggaaaattaccaaccattactgatgtactcaatcgttgcgcttctgtatgccattgtctgcactttcttagcttggggtcagcggtatctcgaaaaattcacatcacgctacaatgccaatgcacaaaccacgcaattataatccgccattttgaaaggaagaaagctatgttaaagaaaaagttgtggttcctgttgccgcttgtggccttggtaaccttcacgctcaccgcttgcaccagcgcatcatctgacacgtcaaaaaacagcgacgtcaccgccgaactcatcaacaaaaatgagcttaccatcggccttgaaggtacttatgcgccattttcttatcgcaaagatggcaaacttgaaggcttcgaagtggaactggggaaagccttagccaagaaaatcggggttaaggcaaaattcgtgcccacccaatgggattcgctgattgcaggattaggcagccagaaatttgatctcgtactgaatgatattagtgaaacgcccgcacgcaaaaaggtctacaacttcaccactccgtacatgtactcgcgttatgccttaataacccgcagcgataacaccaccatcaaatcgcttgccgatattaaaggcaaaacatttgtcgaaggcaccggtacacccaatgccgctttagccaaaaaatacggcgctaagatcaccccgtctggcgactttaccgtatcgcttagccttgtgaaagaaaaacgcgcagacggaaccatcaacgcctcggctgcatggtatgcctttgccaagaataactcaaccgcgggcttaaagagtcaaaccctcaaagatagtgtcgttaaacccgatgaagtagctggcatggtcagcaaaaaatcgcctaaactacaagccgcactttcaaagggcattcaagaactacgcaaagacggcacgttgaaaaaactgtcgcaaaaatattttggcaccgatttaaccaccaagtaatcatgccattcagctagcaaacattgcccgtcaacctgcttcattgacgggcatacataaaagaacactattcattaaaggaggtcgggtttcaatgacccaattcaataccaaactcgttcatggaccacaactaaatgtcgaccaagccggtgccatcgtgccaccagtataccaaagtgccatgttccgctttgctcctgatggtcaggaaacccactgggactatgcgcgcagtggtaacccgacccgtgaatacctggaacgtcagattgctacgctagaaaatggcgatgctggctttgcgttttccagcggtgttgcagcgattgcaacggtgctcgcgattttccccgaccacagtcacttcattattggtgattcgctctacagtggcaccgatcgcctcatcaaccagtatttttctcaacacggcctgacctttacaccggtggatacgcgtgatctggcagcggtggaagccgccatccgccccgaaactaaagcaattttctttgagactttttccaatccgctcctcaaagtcagcagcgtcaaggccatcagtgccctcgccaaaacccatgatctgttaacgattgtcgacaacacgttcttaaccccttattaccagcggccacttgacctcgggtgccgacatcgttctacacagcgccaccaaatacctcggtggccacgggtgacctcatcgccggcctcgttgtctccgctcaccccgacctcagcgagaagctcgctttcctgcaaaacacgatcggtgccattttaagcccgcttgactgtagcctcgtcacccgcggcattgccaccctctccgttcgcttgatcgtgaaactgcaaacgcccaagccgtcgccgaatttctagcgcagcacccagacgtcgcccacgtttactaccccggacttaaaaacgatcccggttacgcattagcccaaaaagaaaccacgggtgccagcggactcctgacgatcaaactagccgacaacattgatcccttaaagttcgttaacagcaccaaaattttcgactttgccgactcacttggcaccgtctccagtctagtcaaactaccttggtttaagctcccggaagacaaacgcgccgattttggtttgacaccgcaacatgtccggattgcaattggcttggaggatcagcaggacttgattgacgatctgcagcaggcactggttgcagcggaaaaatagtatccaaaataatatctattacttttgctaaataggcgcgaggtgacaaagtgaaacatgctcggtcattaagtttgaaatactggttgatcgttttctgtacgattatcattctcagtccgattgctaatatgataagcacgtgggtggaaccgtcagcaacctacattcggttcattgctgttttcttgattgcatggttggcactgaaggtagctaaatatttcacaaatacccaaaagacgaaatagtgcgtttgtcacttcttaattaccgttctgcagaatatagcgtaatcaactaacaaagatattctcaattttgattacattctaaggcgcatttgatataagctatccaaagcttaaagagtggtggctttcaatcctgcctaccataaaccgccagttaacttatttgtcatttgatctggccaaatacatcagcggacgtaaaaatgtgctctgtctatcactgttacgctaacagtgataaacagggcacattttagtgtgcgtttagatattttatcaatcgatgctaatcttcattatatggccatccgattgaaactggttggttaagatcagccgtcccatctgtttcaagcgattgcaacgcctgcaatgcaagtcgcaaccggctcgtgtaaccgtgccagttatcgtcatcccaacctgcgtttaaagccggcacatacggtaaaaagttaacgcgttgggctgtgatcgttaatcccgccgccttacagatcaacggccattccgtatccgtcagcaaaccattcgaattagccaagatatatctggcagccatctgactcaccgcacagcagccagcagtaatatccagatcaggtaaagcaaacacttcagaagccgccttattcgtaattgcctcggtttctcgccaagttgccggataaccccgcatgttttctgaacttcgcccaataatctgataaccatcatcaactcgaagctgggcaataaaggtcttaaactcagatacatttgcctcaatccctgtcaccactttatcaaaatcgcagtaaaaaaaagaagcgtggtaacgaacctgacgcaatccaaaatcaagcacccgccgccgcgcatcagccgcgccacgaggttcaatgatgcgaacatgaacgctgggaaaagtttgcaataatttggtaatttcacgatctgtaatcgtactaactgtcagataagcagccgagaaactatcactaactactgccagaacccgttttaactgcggcaaagacacattgggatggtgaaaccgttgcgagtaagactggttgcatgctaaccacaactcctttgcacgttactgttgacatgggctaggactaacgaatcttatcgaaaccgagaattaacaaattccggtttctccatctcgtgcttgccagttgtgtcccctttttgtcccccttaacgtaatcctgacactttctaaggtgagctaaatcaatgagaacactgatataaaggcattttcatttctaaagtacgctaataaacgctaaataatgcctccaccgagattcgaactcggatctgtggtttcgaggaccattatgctatccattgcaccatggagacttacagattccattataacaatcttgttcaatgttgacgcacgcaatcttccctgccgctcattttctcaagacaaaaagcgacgatcaactgactcaattgatcgccgcttctgttttttgcttacctatagctattggttttactaatcatcaaacttaaacaaatccgtcgacaaataccgttcaccattatccggtgctacagtggcgacactcttgcctttgccgagtttcttggcgatttcaatcgcgccaaaaatgttagcgccagcggaaatgcctggtaggaagccttcttcatggctgacgtggcgagccatgtcgatagcttgatcgctggtgacttcaatgatgtcttgatagaggttcgtatctaagacgtctggaataaaaccggctgagatcccttgaatcttgtgcttgccgccatggccttcttttagcattggcgactccgctgcttccaacgcatagatttgtacatctggattgatcttacgcagagcccgaccaaccccggtgagtgttccgcctgtgccgacgccggctacaaaggcatctggggtgccaccatcaaatgaacggatgatttcttgtccggtcgtgcgctcgtggacgtctggattggcggggttctggaattgcattggcaagaagtagccattttccttgcttaatgcttctgcttttttaattgctcccggcattccatcggcacccggcgtcaaaatgagttcggctccgtaaccacgcatcaaagcacgccgctcaacactcatcgtttccggcatggtgatgatgaggtgataaccttttgccgccgcaaccagtgccagtccaatgccggtgttgccggacgttggctcaacaatggtgccgcctggcttcaagacccctttatattcagcgtcttcaatcatcgccaaggcaatccggtccttgactgagccgccgggattaaagaattccagcttgacataaacatccgcggcgccttcaggtacaacgcgattgagcttgagtagcggcgtattgccaattaaacctgtaatattatctgctgctgttaccataataaagcctccctaaataatcggcgaacggttttcattgcgatgatccgcgatgtggcgaacccaattatcaaaaatcgttcgctgcgttttcttccaattaaacttcggatggtcatagtcgtttttgtgatggtaatagtgtttagcccgtttatagctaatctcagggtgtgcggccacttcccgcttgtattccgaatccaggccccaacggtcatattcaatatgcgaaaagataaacgtttgggtgtcagtcggttccgtcaccatgaagagttttcccttcgttgttgtcgcattgatcgttaagcggggatcgtcgcgaatatcgcgtacatccatctcggcataccgagcatgtggggacttaaagccttctttcaaaccttttaaaaatgggtgcggttcaagaattgtttgcggataaacgccgaataacttgtgcggaagaattaacttgctgacgccgaaaaagtaattcagcgccaccattccgccccagcacaggtacatttggttgggcacatgctgacctaatgtctttagcagcgtccgcacctcggcgatatagtgaacttgatcaaattccagcgtttcaatcggggagccagtgatgatgaacccgtccatcgttgccgcttcgtgaatatccagcggctccagaatcgagctcaccgcttccggtacttcccgaccagcgtaatgggtcatgggatagtaaaaatgcaactcaaccggaatatcggtgtgactcaaaacgtgttgcagccgcgttttggtatcggctttgtcgtgcatcacgttgagaatcccaattttaagtggtgcttctgtcaaggttcacctcccaacccggccaattgactcgcatgcaccggcaaaattttgaaacgattgcctgcagacaccgttaagcaaagtactgccgatgtctcacctgcacgaacacatcaggagaatatcttgataaggctgatagcgccaaccttcgcttgttaccaataaggtttgccatattttaataccctccctttcagtaactatatactaactaaatgtaagatcgatagcaacctttggccttaatttattcgcgtcttcttttcgaataattagtttttaaatgatcttcgtctagccaactttaaccgttcataagtaaatgatatcccgcgctacaaaaagtggtcatacctatataattcaaaaatataaactcggaaaattccaccttattaaaataaacatacctctccgggtgttaaatagttcatgttgttttaaaatgtaagtagttctaagtaccttttaaggaggttttttaatatgcgcacgcacacttcaccttccatcgttaaactagccgcagttggggcggttgcggggttggtttccggtttagtcaaattagggtgggaaaatattctgccaccacggacaccggaacgcgatgcgactaatccaccgcaaacttttctacaacagcatggcttgacaccggcagaaacacacgcaacctacacctattcaggccaccagattccatgggttagtctgctggttcatttcggcttttcatcaagcttaggggcactttatgcggtagctggccattatgttccgctgttcaaactgggttatggcagtatgtggggactgggtgtttgggccggcgcgcatttatgggccatgcctgcactaaatatcgtcccagccgcaaaagatcagccagctgaagaacatctgtctgaagctgtgggccacatggtgtggaataccgtcaaccaaatcgttatcagcgacatgttgcgcgaaaaacacgcctagtcttttgcagatgctgaaacggtaatcatcatgagcgcgagccagctcgggtaaaggtttgagggccgctttatactcgcgttttatcatcccgctttgaattttttccgcgtgctgattcggcgttcaatcccatctaagaaaggagcggtgtctgtgtcaaaaccctctacttcttggcaaaccaaatggccggaacgcattagctatggtttaagcgatgcagcagataatttggtgtttcaggtgatgacgtcttatctgttgtttttttataccgacatttatggcttacaagccggcgcagttgctttactctttctcatcgcgcgaattgccgatgtttttgagagtccgattgtcggcttgatgattgaccatacccattcgcgcttcggtaaaagccggccgtttttcctttggtatgccttgccgtacgcaatctttgccgtgctaacgtttgtcacgccagggtggtcggcaaatggcaaactcgtctgggcctatgtcacttacctcatgcttggcttcttatacacggcggtgaatctgcctattacctcggtactgccgacgttgactcagcagccacaggaattaaccctgctgggcgtcatccgccagttctttggcagttcggtgcaaatcattgtcgctgtcttcaccttgccattggtcgccttcttcggtcgcggcaatgatcagcgcgggttccttttaaccatgacgctttttgccggcatctcgctcgtgctgattctgaatacgtttattcatatccgcgaacggtttactcaggaaaagatcgctcaccaaccgctaaaagttgttgctaaaattgcggtgcataatcgcccatggctgctgctatcattgattatttttacgtactggctgttgaccgccattaaaaatcagaccacggtttactattttaagtacactttacacgatcaaggcttggtatcatgggccaatagttttactttttcttcgctaatcggcgttttattgatcctgatcagctggtcggtttgccgcttattcaagttgctcagcggctaaagactgatgttccgtcgatgctgatgcagtatctgaccagtcctgaaggcttcctggatatcttcggtaatgtcttaaagtccgccgcttcagagcgtttctatgtgggtggccgcttaaatttaatggactatctcggcgactcggatattcacgagttgaaaaagattatgtccttgattgatgctgatcatggtatcttactgaactgcttggcggaccggttcgccaaacgccggttacggttcgtctaggcccggagttaaagccaattgatctggccaatctcagcttgattaccgccagttatgatgtcggtgaccacggcacgggaatgattgccctattagggccaacccagatgccgtattccaagat

SEQ ID NO: 15 - DNA, 2331 bp, LACTOBACILLUS RHAMNOSUS
atcatcgttgaaaaattgcgaaagcggtgctggtaatattcggtcgttgcaagttttttgggatccatcatctaaagctcacctcactcatgaaccaggcgcgcgtaataaccgtcttgggctaacaacgttgcatggtcaccttgttccacaattttgccatgatccatcaccacaatttgttcggttttagccgcaatagttaagcgatgggcaacaaaaataatggtccgatccgtcattgccagcaagcgatcgacaatttttcgctctgtaatggtatccagactgctggtcgattcgtcaaaaatcagtacttttgccggtgacaacaaggcccgtgcaatcgccagccgctgcttctgaccgcctgataaaatactgccgctttctgacaatttggtctgccactgctgcggtaagtttgcgatgtctgcggcaatttccgcagccaaacacgcctgcgtcaaatcttgttccgaaacatccgaacggctacctaacgtcaaattctccaacaccgtgcccgaaaaaataaacggatcctgaggtacatattcaatatattgccgtaatgttgtcaggttaatgtctttgaccggaatgccattaaacgtgatggttcctttatcggcatcaaccgggtaaaagccaactaataattttgctaatgtcgacttaccagaaccgctcatgccaacaatggtatatttagcattttccggcacttcaaggttgacgtttttcaatacatcttggccaaaaccatatttaaacgagacatcccgaacgcgtatcggaccttcgattaaatgccgctccgtcaagtgccgctgttctttgaattccgattcgaccagataaacttcattcaggcgattgttagcaacccgcgccatttgtaactttggctgtaggttgatgatgctttcaagcggattcgtaaagtatgacagcagtgcattaaaggtcagcatctgccccaagctcatccgattggcaatcaccaaacttgccccaatccacaacaccacaacgttcaacgccagcttcaacagacctttaatcgcttgctgtaattgatctgccttggtgtaactaaacgatttcttcagataggttagaaattcccgatcaacccgttcatagctaactcgttcgccggtcagggacttgatggtttcaatgccattcaaatcttcaataatcgatgaactcaagattgcgttactttccatcgtctcttggttcaaccgatcaaacggccgctgaaatgcaaaaacaatcaccaaataacacggcacggcaatcaatgacactaaaaacaaagtcccattttggatccctagaacaatgcctaatattaggacaatccagacatccaaaaacaacgtcataatcgtattcgccagcgcgtcaataattttattggcatccgcaaaccgcgacacaatctctccggtccgccgagttgaaaaaaacgacatcggcaattcatataagtggcgcacataccctaaaatgacatcaatcgcaagccgctgccccaacaccgccatcaaaaaattctggccataagtcaacacagcttgcagcaagtaagccaccaaaaggccactagcaatcatccccatcgtcgtccgcatggcattcggtatatacgtatcaataatagactgcaaaaaatacgacccaacgatactaatgaccgtaatcaataccgcggccagaataatgttcgcgataatacctttttgcttagccagcatgggtacaaacgcaaacaaactgcctttgtcctccttacgcggctgatactgcggcgccggtgcaataaagatggccacacccgaccattctttttcaaacacctctcgcgaaagccaggtcatgcgcactgacgggtcaggatcgccaatcagaatactcgtgcgcgttgctttaaaaacaacatagtaatgaagcaattcaccgcgcttcagcacatgggcaataaacggataaggcacatcctcaagatcaaacaactgcatattcgcctgcaccggtttcgtctcaaacgctagtgcttcagcggcccgaacgattcccaaagccgtcgtgccatcctgatttgtcttcgctaactcgcgcaagtgggctaacgaatagtccgacccattgtatttaagcagcatgtttaacgcagccacaccacagtcacgctcgtcaacttgtgcggtgtagaaacgtttgtagtaggtgatctggcctagttttggggtgtatttaaccattaactctcctcgcttattaagccattagattcaggcctcttttatgagccgatat

SEQ ID NO: 16 - DNA, 2860 bp, LACTOBACILLUS RHAMNOSUS
atcttggaaaacggcatttgggttggccctaatagggcaatcattcccgtgccgtggtcaccgacatcataactggcggtaatcagcttgagattggccagatcaattggctttaactccgggcctagacgaaccgtaaccggcgtttggcgaaccggtccgccaagcagttcagtaagatcaccatgatcagcatcaatcaaggacataatctttttcaactcgtgaatatccgagtcgccgagatagtccattaaatttaagcggccacccacatagaaacgctctgaagcggcggactttaagacattaccgaagatatccaggaagccttcaggactggtcagatactgcatcagcatcgacggaacatcagtctttagccgctgagcaacttgaataagcggcaaaccgaccagctgatcattgacaatgcgaatcgccttttccagctcgtcagatgagatgctttcaggaacggtgaaaacctgattttcaacattgccgttgttcgtcactaaaatcgccataacctggtgattgcccaacggtacaaggcgaaatccggtcaatttaatgttattcacttctggccctaagctgatcgccgtgtaactggtcagattggataaaatctgcgcactttgcgccacaatttcatccatcttattgtagcgttgaccgaatgcttgcttgatcgtggctagttcacggtgggaaacacgcactggctcgaccagatgatcaagatagtagcgatagccttgagtcgagggtactcgaccggaactgctatgagtcttggtgatcaaaccggcgtcttccagcgatgccatatcattgcggatcgtggcggaactgacatgaaccggcagttcctgcattaacgtcttggaaccgaccggctgcccactttcagtaaacaggcggatgatttcttttaagacgagcaattgccgtttcgtcaacattttctcacctcacctttagcactcgttttacacgagtgctaatacactgaataatataccaagcgccgttagcaaagtcaaggtaggattgctaaaatgttgcatcaaacagccaactacggttagatttttggtcatatccgaagcatgattcatcattagaccagtggctcatcaagtaggaattgttggaaaacctcatttcccaaaaacttaccgcgattcgtcagtcgaatataaccattttggcgctcgattaacccttggctttccagctccggaaccgtctcgccataaactgcatcgaccgtcatatgatagcggctataaaaacgatcttcattgacgcctgccatggtgcgtaagccaaggaacatttcttcctcaatttgctcagaaaccggtactaaatgatgggccagaaccggtaaatggtcggcatgcaacggtgccagatactgtttgatcggcccataattatgataccggtcacgaccaagatagccaaatgcgcctgccccgaagccaaaatatttatcattttgccaataaagtagattgtggcgacattggtaccctgttttggcaaaattactaatttcatattgatgccgtccgtgagcttccattaaatcaatggcatcttggtacatatcagcttcaacgtcttgcgtcggcaaccgcagcttcctttgacgcatcagattataaaaaatcgtcttgcgctccaggatcaatgaataggtcgagtaatgtggcaagtccaatgccaaagctttttgaaggctgttcaaaaagtcatcgcggctttgatctggcaggcggaaaatcaaatcaatcgacaagttgtcaaacccgacttttctagcattgccgatcgccgtataaacatccttcgctcggtgaatccgaccaatgcgcttcaagacatcatcattaaacgactgcacgccaatcgacagccggttaaccccaaagtcgtataagacctgtaacttgtcggtggtcagtaagtcattgggattggcttcaaaggtaaattcaccgtgatcaaaatgaagaatatcgcgaataccttggcacaaaacggcaagctgttgcggtgtcagcgttgttggggtgccaccgccaacataaaccgtttcaattttttcttctggatgctctgccatcaccatgcgcatttctttgagcaacatggcgacataatcatcgaccggctgaccttcaataaacaccttattaaaatcgcaatagtaacaaatatgctcgcaaaacggtatgtggatatatgcgcctgccatgttaatccttcctcacccgaaaatattggcgaacggtttgttcatctgtctttaactgcgcaatcaaagcatcggcaccggcaaacttgacctcaccgcgtaagtagtggtaccaacggacttgaaccgttttaccatagatcatctggttaaaatcaagcaggttaatttcaagcgttaccgcccgatcatctccaaatgtgacattgcggccaattgaagccattcctaagtaccaagtatcatcaactttgacggtcacggcatagatgccaatacccggaagccgttgttgccccaaagtggctaaattgatcgtcgggaagccaagtaaacggccgcgtgcttcaccatgaaccactttgccagttgtcagatagacatagcccagtaactcgttggctgtgtcaatgtcaccacggtctaaggcatctcgaatacgggtcgaactgatcttttttcccgtcctcaaccagcttaaggaacacttgacgactttaaaaggcgacccgggcgcattattccgggccattaattgccatatttgggccaacagcgcggtttggccataccgtataagtccaa

SEQ ID NO: 17 - DNA, 4399 bp, LACTOBACILLUS RHAMNOSUS
atcttgttgtctgtttgatagcccgctggtaatggttggttgctgccgtgtataagcatcacaataaacttaaagccgctggtatgagcttcacacggactgtagtggagtgtatcactgaagaattcaaccactgttccagctggaacgaagaacagtttcgcttccttttcagcattaaattggccattatgcatttgaccacgtttaccgatgaccatgaccacatcggtgaagaagacattcacttcgctgccttgatgaaattcaacagcagttaaggcgtcagcgtgacctgcgcattcacccgcttcaatcggtaagccagcgtaaacatcacgaccgatttgctgcacaactggaattttttcgatttccgggtttgagggaacatagagatttgcctcagttgatgcagggatggtgacgtgctgatccatgaaagtctttagttcgctaacatcatattgagtataagcaacgccatagtcctcaaaaacggactcatctaggctatggatcgttttgttgggattaatagttctgatttgatcgatggttgacataggatggcttctttctgagtgttaagttaataggactcgattgagactttagcaaaatattcgtcaaatttggcaggatcgacaaagccggtttctgcttccatggtgttcaacatacctgtcgtcattgccattttcatgatgtcttcgtctgacttgccatcatgaatacccattgcgaggccggccaaggttgaatcaccagaacccaccggattaaccactttgatctttggaattgccgcgtgatagaatttgtctaaatgtttgacaaatgcgccagccgatcctaaggaaacaacaatccaatcgacaccagcaaaaattggatccatcaaatcttgtttcaatgcagcatagtcggttttgtcgacttcacgttgaagtaaaccagctaattcttcttcatttggtttaataagcagtggttttaccggtgcttctaaagcggattttaaagtggcacctgatgtatctagcaacactttgacgtttttcttaccggcgtgagcgatcatttgggtgtaataatcagttggcaatccctgaggcatagaacctgaaatggtgatcaagtcacttttatcaagcaacgcgtcaaaatggtttaggaatttctgagcgtcctcctcggcaatcgttggtccaggctccaaaatctctgtttgtttgccaccatcatgcaacactgcaatcgaactacgagtttcggcattgattgggaaaaagtcgtgggcgattccgtcttgatcaagctgattttccaaccatttgccaaaatatccgccaatgaaaccagttgctgtgatcttgtgatctaacatatgaatcacacgagaaacatttaatcctttaccgccggcagtctttcgtacggttttgacccgattgacagtatcgattttcagatgatcaagtggatatgaaacgtcaatcgatgggtttaaagtgaccgttaaaatcatgggtttttcctccaaaaatgtgataatgaacctgaaccaatagaagcttgttctcgcgtatgtaataaaagccgattcccttaggagtcggcttttatcatgttcacgcgaattaagcgtgttcgaccttgtccgtccaaggagtagcagtatccgctaaaaccttgttcaaacgatcgatgttagctttaccttccgtttccagccattgcttgccggcagcttcgccttcagcagcaaatggcttaacgcctggcttccaggttgcccggccgcaaagcacaccgttaaaggttgaaccggcttccttagcgaatttgagttcttcaaggaacaattcgttggaaacaccagcggacaagaagatgaacggcaaatcggttgcgtcggactgggccttgtaatatttggcagcttcttctttggtataaaccggggttacgccttcatcggtgaagccttcaacaaacttctgatcaaccgggacttcgacttttagaacggagacattgtattgcggcttgctgaattccttggtgatcttgataaccttttcaggctttgctttcgcccatgcagcggtgccggtttcgttggtcttgccatcgtaagaaaccagttccaggaacagtggcagatcattagccttagcttcagcaccaacccgttcaacaaacgcatatttacgatcgttgatactgtcaggttcgtcagggtcaatgtatagcaggaatttaaccgcatcgccgccttcgttcttgatgcgcaaagcactttggttatcgatcaaatccgggaagcggccaggttcagtcgcatcgtagccggttttttcataggacagaagcaagccggcttgcggtgcacgaactttggcagctggcaggccatattccggatcaagcaaaattgaactggcatatttggttagttcttcagaaaccgctttcttgaaatcgacaatagtggtttcatcagctggcttgtttgctgcagctgcaagcattttctttaaagaaccgcgttgatcgatggctaacgctgagataacgttattttcgtcggaaagtttttgcagatgcttgaattggcccgcagtaagggtgactgtcatgtaaaaatgcctcctaggattttaatgtttaattagtcgtgatagacgccttcagcccacttttcaagttcagcatcaaagaaatgcgggttgtctttttgatcaggatttggtttcgcgatgttgtcgatcttatcaatcaactttttattttcgggcgtttctttgtaggtggcatccagataagctttgacaatatcttgaatgaggtgaacgccgacaactgcgccaccgatacctaagacgttagcgtttagctgttcgcgagcatagacggctgaggtgacatcatcacacatagccgcgcggatgccttcgtttttatctgcggctgttgaaataccgatacctgtaccgcacatcacgatgccgagatctgcacgaccatcagcaacatcttcggcgaccttcttaccataaatcgggtagtgggtacgatgcgtgtcataggtgccttcatcaataactgtgtaacccatgtcttttaacatgtttgaaatttcaatcttttgcatcgtgacgatgtgatcgttaccaatagcaataatcataagtgtgaagcttcctttctatattgggtgaaagacggcgttaaatcattttttcaagcatgtcgagccggatttgatgacggccgccagcatattcggtatccagataacgttggatgatgaccagtgcgcgatcataacctgtaatgccggtaccgatagcaattgccttggcgccattatgttcagccgtcatgtgggcagtgttttcttcttcaacgaccgcggtaaccatgcctttgactttgttagaagccatggcagaaccgacaccgtaacgatcaaacatgatggctttgtgcgcatcactgtttagcagctttttggtaaccgccagtgaagattcaacaaaatcttcggctggttcaggcgtcacatccgcgacccgatattgatgttcctccaaatatttcttaacttgttctttcattgcaaagccatctttgtctgcaccaataatgacatccatgatctattctcctttttttgttttgtctgtaataacatgcgtatatgtgttgtaatgttgccgatcgtcggcgctgattccgggatcagtgataagcccgtctgtttggtcaaggtcgtagaaactgtagaaatcttgccgattaagtttgaaatgatccgcagcaacaaatttcatccccgcattgttcaacgcaattcgctgcgtctgaccttcttcggggctggcgttactaatgtgattgtcagcgataccgttaacactgatgaatgctttggtcgttgtgaggtgagctaacatctcatttgccaagcttccgataaaggctcctgatcgttcgcggagctggccgccgattagttttaacgagaagtaatcggcgcggtcctgaaagctttggaagacgggaagactattggtgatgatccggacgtcaggtttcttgaggtactgtgcaatcagttcattcgttgtgccgggcccgatataaatcgtatcgcctgaagtgatgatatcagcaatggtagcggcgattttacgcttttcgttgacgtgaatggaccgcttctcatttctggacaattcggttagcggtttaaaatgggtactttgtgcgccgccgtgaatacggactaactcatttctttcagcaagctcttccagatcccgtcgcacagtcatggttgaaacgcctaaactttcaccaatttcgttaacggtcacaatccctttac

SEQ ID NO: 18 - DNA, 2432 bp, LACTOBACILLUS RHAMNOSUS
atgagtaacaccgcatggcagcaatactggtttgcaagtaaggttcagccatctgcatggtttacttacctgctgatctggaacggcagccaaattcttagcaccagtgccgaaaagctctccaacgggttcaatcctgccctccgcacccaacttgtggacaagctgcaaactgttagtgggatactcgcggtcagcttcgttgatggtcggtatgctggcagcaatattattgtcgaagccgaaatcgtgttcccagccggtgatagcctcgccaaatcctaccgcatctgcaaaagtgccgagcaagtcctccaaagtgactttccagtgctgtactgttgcattcaggtcaaacccaacttacccaaaaatatatctagatgatgagctcccaccacacttgccagcgtagagaagtgactaacacttaaaaagcacaagccacagacagaatgagttctggctgcagcttgtgcttgtttaggttcaaaatcgactaggcttcgagcttttctttgtttgaatccgccacataatgcggaatctcatcatcaatgaaataaaccttataccaaactaagaaggtataaatcgtccaaactttgcggcgatcattgcgctctttgcggtaagtcttatcgagaatatccaaaattgcgtcttgatcaaagaactctttaacccagtcttgctcaaatgtttcgcgaacctttttataaaaaggttcatcttcaagccactgtttgaccggaaccgggaagccgagtttttcgcgactcgcccattcttctggcaagtgacggttggcagcttcacgcaaggcgtacttagaattgtgcgagttgatcagatatttggttggaataccagccgccactttggcaacttccttatccaaaaacggtacccgcagttccatagagttggccatcgacagcttgtcggccttcaacaaaatatccttaggcatgaactggtgaatatcaaggtactgcatcttcttgacttcatcatcgtaatggcgcacctttttgtacgattccgttacgatatcacgaacactcttactctggcggaattccggctgcaagatctcatcggcctggccttcatggaaaactaaggcctcaccaatgaagaactcttccgccggggccgtggattcatacagatgcagccgtccgtggaagttcggcatcttcttcaacccatgggcaatgcggtacttcacgccgcgcggtaacttgcgcaagccgtccgcgaagacccgaatcgcatggctgcgggtgtgaaaaccatagttagcatacccggcaaaaagttcgtcggccccttcaccagacaaaataaccgtcacatctttgtgagccagtcttgtcaggaagtataacggcacgcaggaagggttggaatccggttcgtccaaatgatattgaatcaacggaaagttatccaaagcctctttttccgtcacaatatcactggtgttatctaagcccagtttgtcgctaagttccttcgcagcgaccccttcatgatacttcttgttgtcaaagccgatggagaaggtgtgctctggccgcaacagcgcggtaatatacgacgaatccacccctgaagaaagcaaggagccgacttcaacatcggaaatccggtgggcatcaactgattcggacacactcttgtcaatggcagcaaccgtatcttcaaaactcagattgttcgccttgaagtccatatcccagtacttcttaatcgtgagttcattatccttcaacgtgaagtaatgaccttccggaatgcgataaacgcctttgaagaaagtttcgtccaacgcggagtactggaaggtcaaatacggtttgagtgcttctttgttcagttgcttcttaaacttaggatgcttcaaaaaggccttgatttcactaccgacgatgaacgtgtcgccatcgtggtagtaatacatcggcttaatcccaaagaagtcgcgggcaccaaacatttctttcttgttgtcatcccaaatcaggaaagcaaacatgccgcgaatctttttcaacagttcttcaatgccatactcttcgtaaccatgaagcagcacctcggtgtcggaatgggtcttaaacacatgtccggcagcaatcaaatctttgcgaatgctctgaaaattatagatttccccattaaagataatcgcaacagtaccgtcttcgttcagaatcggctgcgaaccaccctttaagtcaatgatcgacaaccgacgaaatccaagcgcaacatcatcattgatatattcgccactcgaattcggcccccggtgtttgatcatatccatcatgttattaataactggtttcttgttcaaaattgtcttgtccgcaaacgcgatgattccgcacatacagttaaccccttttcgcgtgaatgac

SEQ ID NO: 19 - DNA, 1216 bp, LACTOBACILLUS RHAMNOSUS
atgctcaaacgcggctggtcctctttgaagatcatagggatcatgattttaataggtattataggtggctggacaggtatattgggtgcttagaaaggttggtatcaaaatgcaagcagtactagaaaatgggccaaaacagattgaaatcaaatcatttcctgatccagtgattcaaggtgatgagattttaatgaagataagagccaatggattatgccaaaatgacgttcgcgattatacgggtgatacaaaatggacttatccgcgagtcggtggtcacgaattcagcggcgaaattattgcagttggcaacgctgttaatcccaagcattttcaagtaggcgaccacgttgtgaaatatattctgccaaactgtggtgaatgctattattgcaaaactggccggccaaatttatgtacggaaatatactcgtcaccaacatttcacaacgactacggcatttcgggtttctgggggatgtctcagttgatggccgttaagacaactgacttgttcaaatatcctcatacgacgtctttcctggatatggcctttacggaacctttaggatgtgtgattaacagtgtcgaacgggcgaacgtgcagcttggccaagatgccttggttattggcggcggcgtgatgggtttgttacacgtgatgactttgaagttaaagggagcgcgcgttctggttagcgaacccaatgaaaaccggcgccgattagcgctagaactgggggcagattttgtttttgatcctatgcagaaagatccggttgcgttagtcaagaatgaaacggatggtcgcggtgctgatgttgtctttaatacaaccgcagtgccggcaattgctaaacaggctattgcctttacagccaatggcggccaaactttcatgtttagttcgatgcatccagacgatcccgtttcaattgatctcggtgccgtgcatgcacacgaaaaatttatcaagggcaccgtgagtcctaccagagaaacgtatttccgagcaactcagcttataagcaaaaaagcactcaatctgcggccgttgttggataagacgttcccatacacggatgctgaaagcgcgtttcaatatgctatgctgccagaaacgctgaagacgatggtgacgtttgattaggcgatcctcaggaaggtgaaatcattgggcaagcaatatattggcattgatttaggaacctcc

SEQ ID NO: 20 - DNA, 853 bp, LACTOBACILLUS RHAMNOSUS
atggcttgcgattacaggacatgatcgtgttacgccgcaaattgttgttgacgcgtgaggataagacaaaggagtaaggctattggcgaaaaagcgccgacgttttaccttaaagaaggttccattggcggcttggctggtcatcgctttttttgcggttggttcaatgttggttgtcagctcgtattggtcgcaacggcaagccgaagtttcacaacgccaagcaattgtcgataagaaggcggctgaaaaagcgaagaaagaggcttttatcaagcgattggtaccgacagcccaggccatgcagaaacagtatggcgtcttgacgagcattacgctggcccaggcgattcttgagtctgattggggaacaagcacgttagccaaggattaccataacttatttggcattaaggggacggatcctgccaccacgaaagtattacggacgaaggaatacgttaatgacaaatggatcacggttgacggccggtttcgggtttatagcgatgatgctgcttcgattcgggatcatgccttgctattcgttaacggtaccgactggaatccgcagcagtatgcaacggtgcgggccgcaaaagattataagactgccgcctcggctttgcagacggatgggtatgctactgatccggattatccccagaagctgattcatttgatcgaagcatggaatctgacccagtatgacaattgaatgttcgtattttgttgattattgaatcctcgttatttggttatggtagcgccaaattgcgggggtttcgttcttttatcgctgtgaaagcggctacttagtttgttcgggaattagtgagcttgtattgttcca

SEQ ID NO: 21 - DNA, 3722 bp, LACTOBACILLUS RHAMNOSUS
atggtcgactatgttaatccggggttaaatgagcataagccggatctggcgtgggctaaagaatatgcaaagcgcgttaaaaccgataacaccggcttcaagaatgacacagaacgtcaactttataacaagatcaaagtggtcatttccgatgaggtcggcgttggtagttttggtaaggatatggtcaccgattcatccttacgaaacgcgattacggcagccggctatcactactcaaccgaagatgacagcgctaagaacttcaccgcacttgctgataagtacgacaaggaagtgtggaatagtgaagctcaggccacttttggcaactccgactactggcctaattccggtaccggaatcggtggagcaggcagctcattagaaatggccaacaccattgtgaaaggctttaccgattcacggcggacgaattttatctaccaaccggcaattgcggctttctatgaaggcggtcaatattcatctaagagtgtcctgcaggcaaccgatccatggtcagggtggacgaatagtgatgttgcgattgatgtgcttgcccaattcagtaaatttgccaaacttggttgggaaaatagcgacaatacgtcgggtatctggcgcgccgtatctcaggcaagtgtttctacggcaacgggttccaataatgtcaacggccgcaacggtttggctaactatttaacccttgcttcaccggataaaaaggatttttccacggttatcgtcaatgatagtaagtacacgaaacactatcagatctcggcttccaacatggcttataaaggaaccccgacccttgaagaatgggaaacacgggcagctgatacgactgcaaaagatgcgtatgacagcaattacctcaaacatgttggcgatgtccaagctgatagcaaaggtgtttataccgttacggttaaaccattttcaatcaagacggtcaccacgcttgataaggcaaaggattccgatttgaaccaaggtatatcggcttcatcgaacaagcagcggacggtacttgataccgataccaatggtaaagggaccgacacctcagacacgaccttgtatgcagataattttgaatatggcggtaagaaagttgcaacgctgaatgctgatggcactagcaacgccgcaaagactgaagacttcataacatcgcgcggtggtgacgaaggcttctatccgttgtatacatttaatcgtaatgggacacttgaaggctacaagacgacaaatgccaagtcaggtcattacgttttacgccagcagttggactcaacggtggtcgaaccgggcggggcttggaacgatggcgatgcgttggcatggatcggcgacaatcgctggatgaattacaaagccagcacggatgtctcatttgaagataaaggcacccatggcagcgcaaattatgcttcgattggcgcacgccagcaggctgattcaggcccggcagcctacctgaaattctggcaggatggcggctggtcattgcatatcggcagccagtcagttgcaagcggcaatatcgccactggtcaaggcggcaccaagatttctggcttcgatacaacgaatacggcttggcacaatattgccattcaggcagcaggcaataccatcacggcttccattgatggccaaaaggttgctgatggcaaggtcacgtctgagctttccggacgagttactttaggcagcggctacttccacactgactttgataacctgaaagttgaaactgtcaaaggctataccccgtactattcgcaacaaatcgatgacttagagatgtacgacacatctgccacaccaaaacaacaactggtttataacgatcagtggacgcacgaaaccggacaaggtatgtacttgcgggaccggacagtttccaagaatacaggcgccggtgctacccttacgtatacgttcactgggaccggtctggatatttgtggcaacaatgatggctcagcgaagttggatgtgacggttgatggcaaacaagtcgcaacagatgctgcaaccaacaaggctgacaatctcggtcagacctacacattacgaaatttgaagtacggccagcataccgtgacgttcactgtcaaaagcggtacgttagcagttgattatgtcggtgtcgtcccaagtgacaccattgccgatttcagcaagctgcaaacggcgtacgataaagtcaaagatgtcacgaacgccgataacaagtacacgtcatcaagttggacatcgtttcaaaaagttttattagcagcaaaaaatgtccttgcagacacgacggcttcgcaaaacgatattgatacggccctcaaaaacctcaacacagcctatgccgccttggcgcttaacccagacaaaacaaaattgcaagcggcttatgataaggcaaaagctgtgactaacccaagcgataagtacacggccgccagctggaaagtattccagaccgcattaacggatgcgcaggatgttctcgctaacgccaacgcaactcaaaatgatgtcgacagcgccttggagaatctaaatcaggcagcctctgacttagtactgaacccagccaaaccagataagacgaagcttcaggctgcatacgataagaataagacggttacgaatccagacgacaagtacacaagtgaaagttggcaggcattccagacggcgttatcagatgcgcaaaaggttcttaccgacaccaacgcgacccaagacagtcttgatacaaccttgcaaaagctgaataacgcttatgctggcttaaagcttaacagccaaaaaccagataagtcggcactacagacggcttatgacaaagacagtacagtgaccaaccaagctaacaagtacacgaccgcaagttggacaaccttccagtcagcacttgctaatgcgaaaaaagtgttggcagacactgacgcggttcaagcagatgttgatacggctttgcagaagttaaataatgcttatgacggcttaacccttagcccggataaatcggcactgcaaacggtactcacagaggcacaaacgctcagtcattcagcagtaactggcgaccacgaaggtaactacccagcagatgcgcttaaaaccctccaagttgcgatcgacaccgccaagaaagtcgcggataaccctgatgcttcaaaaaatgatatcgacactgcagcatcaacattaaaacaagcagtcacggcctttaaacagaccattgtgaccgtcaaccgcgaccaactgactcagctcgtcaccgagtcgcaaaccttgcgtgccgatgattacacccggaacagctggacgccttatcagcaagcagtagcagcagcacaaaaactgttggcaggtaagccgagtcagcaagaattagatacagccgcaaccgcactgaagaaagccaaaaccagtcttgtcgcagcgccaacaggtaagctgccatcaacaggtgatgcttcatccgaaagtgccagttctagcgaagaaacagcttcttcatcaacagccaagtatccaagtacaggtgaatcacagctgtcactggccgttacgatggcagcagtcgttttcctcattggcatcagcggctttgcatggttcttacaccagaaagggaaagctaaataatcaagcacgtaaagtgaacgactagataagctaagacccctgactatggaaga

SEQ ID NO: 22 - DNA, 7754 bp, LACTOBACILLUS RHAMNOSUS
attgcaggccgatatgggaataaacacacgatgcgtctgggtatgatcattggcttaatcggccagctggtcatggcaggtggcgtttatgcgcggaacttgtggattttatttcctggcattttgattaacagcgtcggccaagggatgattgtcggtttagtgtcgattatgttagccgataccattcgctatggcgtcaccctcggcgctcaggcggaaggcttatttgcctccagcaacgatttcggcgttaatctgggactcggcatcggcggcctcatcactgccggactcttcgacctcaccggatacgtgcccaacaccagtcaaaatgctgcaacgcttggcatgattaacctgaattatgtctggctgccgttggtgctgtatgggtttgttgctgcttttgattcacttttatccggaaaagcaaatgttagctgcgattgaaaaggcatcaggcttaagtcgcccagcaatgatatgggctgatgtttttgcccgctcacatgccaatacgtttttcccgcatcggctcgcgcgccatacgcgttcaccggtacaaaaaaagattcaacgacttccctaaaggcagttgttgaatctttttttctcactgagcatccagatcattttcatgaagccgagcaataacgggcaaaatcagccctaatgccaacaaaataaccggcgtaataatattcaagcccatctggaaccaccatgtgccggggtcattaagataactgattttcggtaacattcccaacaagcaggcaaaggcggtgaagaagaagcaccaacggcccacgagcatgcccaagcgtttatttttaaccagcatatagtcggcctggaacttttcgagatgttgatttagcaaataatacgcgaggaaaacccacagatagcgcaacggcatgaccacagagttcaaattaagcagccacttgtaaagctcgttcatgttgccaatgccaaacgctggaataatgatcagcagacttaccagaataccggtcatccagtaaccattaatcggtgtgcctttgcgattgatccgccgcaattttttaggaataaaatgcggatcggcgtcactcagcaagattttcagcggcgcatcaatggaaaatgccaacgcggagattgaggccaaagcattagcgattgaatacaaaatgacaaacaaaccgccgacgtgataatacttgcctaacattgcaaacgctgtgtatgggccattcgccataagatctgtcggaatgtggtggctgttaaacaacatccccataccaaaagaccctagcaacgcgcaaaaggcaaccatgcccgccagcaccagcatgcccagcggaaattccttggaagcgtgcttggtattgttgacgtatggcgatatcttttccgcgccgccaactgcaaagactagcatggagatcgtcgtgaagtagttgaggtcaaatttaggcaagtaagtatgaatgtcgcccatattcggagtcgccacatggacgccttttaccatcaacggtgcggtcacagctagaataatgaaaagaatcgacatcagaaacatcgccgtgcctgccatactgccaatacgattcaaggtggttagcccgcgcgaagacagccaaaggaaaagtaagaataacgccagacagattaaggaaacggtcatggacgagacggtgttgacaaaatcaccgttgcctttaaacagccagctcaaggcaatcaaaatcgcttgcggcttctgggctaaataagggatgtgcacgacccaataagtccacgccgcatagtacgccaatcgcacactgccggtttccttgatccaggaactaacgccaccggcttgatctttaaacgttgatcctagctgccccacaatcaaagcatagggcacaaaataaatcagcataatcagaatccagctagtgacaacggaaaggccttgttgtgcatagttattgaacacattgccaagaccccaaaccgatacgaacgcgattaaggccacgttataccagcgcagttgtttctttgtgtctgccacaaacatccctccaaacggtatcctgctcgattaggaacagttactcgctcttcagtgtaacggtttgaccacctctctttcccgtgaaattgtatagataaggattagatttttctaaaagcccggttgcggtttcgttatttcatgccgtatggatactcattaactggaagtatgaaggtataaaaagaccaccactgtaatgctgagtggcggccttttgtcatttctctttagctatcagccaagacggctaatattttacttaatagctttggcaactgcttcatacacagcttgttgctctgcttgaatcagatcgacgcgactggcgataacgctggtgtccatggtgatttcccgcgttaggccaggtgtcggtagttttggctcgaagaatttcttgaattcatcgagtcgttgcgtggtgcggaaaataccggcgataacggtgatgtaggtggtgaattccatgtcgccgccaaccgttttttcaagccaagcccattcgttgcgaacccaatcccatgctgcttgttcgccggcgtggttgctcaagacgccgcggaaccatgagcgcaaatcttgcggcttaatggtgtcggcattttcaaattgatccacaattttagcgattaacgcggcatccggggtgctggttaacgctgcaagaatatcggctttgtagcttgagtcggttgtctgcttatacgccgttaacaactgatcgaacaaggtggcactgccgaagtttttcacttcattttgaaggacaaacatccgcacatcggccggtaattgaagcaggtgatccttatttgccgtaaatagatcgtgaccttgcgcaatggcgtctttattcttagcatacaacgccatgcttaggatataaggacgggttaattgatcatcattggattcgccgacttttggtgtccagcccaggcgcttgaactggtcggcgctgagttggttgaagaaggttttcagctgcgtttcttcggctgaatccgggttgacgaattgttttaagtcattggccacccgatacaaggcgttgatgacgatggcactgtgactctgggcaaaccgcggcagcaacgacacaatgtcggcataagcattttgccgaccctcagccaataaccgtagatcttgaagtacctgccgctgatcaatcgcattgagttggtcaagatgcgccaaaatatcggcgagtaaggtggcgtcgtatttcacgatgaaatgcgagttattgcccacatttacacggaatggttgaccgcttgcttcgcgcaactgggtgtaatcgcccaaggttacctgcttatccgcaaaaatctgcggtgcggcagcataattgctattgagcggaatctgccattgcctgcctgcatctttgcctgcaccaatgaagaattgttgctgggacaaggtcagtttgccatcaaccaccgctgctgtcaccactgggtagcctggttgttccagccatgactgcatgatggtgccgacatctaacttagccgctttacccaaagctgcccacaaatcagcaccggcagcattgccaaaatgatgggcctcaaagtatgccttcaaaccggcccgcaacgcatcatcaccgattaaggaacgtaccatgaccagcatccgcgcaccttttgcatacacaatcgcgctgtcaaaaagcgaatcgatttcagccggatcttctacttgaacatgaactgactgaaccccatccgttgcatcacgttgcaacgccattggtacttccagtgtctggaatgtttcccaaatatgccagtccggttgcaaggcatcaaccgcaacatattccatcatgttggcgaaactttcattcaaccacagatcgtcccaccacttcatcgtcaccaaatcaccaaaccattgatgcgccagttcatgcgcaataacggtagcaacccgctgcttggtttccagcgaggtattgtccggatccagcgtcagcaacgcttcccgataagtgacaagcccccagttttccatcgcgccagccgaaaagtccggcaacgccaactgccaggaatgcggaagtggataaggggtctggtaaaagtcttcgtaaaattcaatcgagcgcttggcaatgtctaacgcgaagtcaagctcattaggttgatgtgctttggtagcaaaaaccccgattttaacgccgctcttggtggttgtctgcttattttgcaattcaccaaatgcaaaggcgatcaggtaagtcgacatccgaaccgtggtgtcaaaataatgaacgccattttcttcacgaacttccggcatgttactgataatcgtttcaccgggatgttcatcaaatttaattgctaaatcaaacgtcgccttggcttcaggctcgtctacactaggaaacgcctgacgtgcagccgttgtttcaaactgggtcccgataatctgcttcttaaccccgtccacttcgtaataagaaggataaatacccatcatggtgtccgtcaacggtgcagtatacgtcagtgtcaacgtcaccttgccagcttgcggcaaagtaatccgcaccgcttcggcaggatcatccaccgtaaacggaacatccttgccgtcagcctgaaccgcactgaccgtcaaatacttctgatgaaccgcaatttcggtttgcttggcatcaccggtaatcgtcgtcttcccggaaatcttcttcgtctcccggttaatatccaagtaaagatcgtaatgtttcggttgaaacaactgataaaaatgcgtggctacaagcatgcaccaattcctcttgtgtgtgagcgcaacccaccgcggaagaagtcggagtgtaagccgccttgggcgtgatagccgccctttggccattgggacccaggtccttacacccaaacttttgcgctggtgagcgcgttatgaacaaacgccgacccaacgccggtgaaaaacccgaccccgtgatgaataaaccccccacccaaacgggttaaacccttacaccggcaaacccgtgatgaaaaccttaaataccgcttattttaccccaagtgggccccccgtttgtacaaaaaatcacaccgtctaaaccgcttggttgcaagaactattttaaacgggttaccaatcgccgccgcgccaaaagaaagtttatgatcatcaaaacccccgcgacccctagtggaacccaattatcgtttacgggtcgctacgccattaaggtcaacaagtttaccagcccataattgattgctaccaatacaaagcgcaaagtagacggtcggaattaaatacgccaccgcaagtgactgagagcaacagtaactaccaagcgtgatgctcccaataaataaactcttaaccagcgcattgcccaacagaacgccagcagccaatgtcgttccctgaatctgatatagaccaagcagcgtaacgttcagcactgccaacacgccaaaataccaagcaaatcgcaccgcgtaaaccgtccacaattggatcgatttactattgataactgccgctacccctgttgtttgctccggtaaaaataagctgccaaaacaaaagatcgctagcaacggcatccacaactcagtcggcatcgctgcttgtgccaagctctgcggtgtcagcgtaaaaacaatcggaatgagcccccagccaagtaccgcaatgaggctggttctcaagacgttggttttaatttctaatcggacgaagcgacctaaacttgagtgcatgtagttagctccccgttgtgcagccaagatccaagcagttaacgccatcagtccaagcgccaacaaagcgtatccgagccgattttgcaacagctggtttaaatgggcatagtaatacgcgccattgtgcagcgaattatgccgcgggatcaataaccatccgtagttaccactcactcggcgagcacccgccatcatcgttaccaaccaccagccaatttgaatgccaaaaccaataaaattaccaaagatcgccgcacttaaatagccaaccgcactgctgaccatgagcgttggtaacacccagataaaagccattttcacaatcgcggtataatccaacgacatcccttggtataaaacggcgacctgaatcgtcaacgcaatggcgatcacaatcactggcacaaataaacttcctaaactcgcgacataccgcgtcaataataagcgcggcgtggtcatcgccttggtttgaatcaccgccgacgcatgatgccggcgatcggcagtacaaaaagcaatggccacaattgtcggtaaaatgcccatcatgattccggcaatatccgcaaacaatctcgcaaacgctccggtgacccgatcacgttgccgaatgagctgctgatccgcgacgacttcggctttcgtcatccggcgataagcaaaattctgaatattttgtgaactgtacgcagactgtccacccaagagccggtcaacttttgccaacgttttaaccaagggtgcgcgcgtgtctgcatcctccgcctcagtcatcaactgccgaacttttgcctggtctgccgcgcgtaacgtcacttgttttgcaaaccccaacggataagtcgtatacaaattatgccgataatcgtagtgcaactgatccagactgtttgtcttgagtgtctgataatcggtcgctgtaatattttcgtagctcgctggtgatttcggcagggtggttaagtttcgtgaaagtaatggccagacattcatcacgataaatgccacgactaaaaatgtgtaaataacaaacgttaaacttcgcgtctgccgcttaaattccatccaaagtagcttcacaatgacacctcctcacacactgcttaccgtcttcaccaacgcttgatgatgctgagtttgtgaatacagatacgcctcctccaacgttggcgcaaccgattgccaagttgccaacggagtacgagctaacaagcgtacccgaatatgctgcccgtgcgctgtttgttcactaatctggtactgcgtcttaaactgtttaagctgcgccaccggtaagtcaccgacaaaaacatgccccgcagccgcatcaataagctcgtcagtggtcccattgaaaaccagtcgcccatgatcaaggatgccaatacgattagtcgttgcctcaacatcggaaacaatatgggtagacaagagtaccaaacgctcattagcaaaatctgccaacaaattccgaaatcgtatccgttcttccgggtccagtcccgcggtgggttcatcaacaatcaaaacccgtggctcattcacgagcgcctgcgcaatgcctaaccgttgcaacatgccgccagacaacgccttgactttcgttttcgcctgagctgtcaaatgaacagctgccagtaaccactcaattcgccgcttctgctcgcgagccggcacctcagctaagattgccaaataggtcattgcgtcaataactttcatggttggataaaacccgaactgttgcggcagatacccaattttgcgccgaatactgcgcgcatctttaagtggtgtgccatccaccaacaccttaccggaagtaggtttctcaagtgttgtcaaaatcttcatcaacgtggatttaccggcaccgtttttccccaataatccatacattcctgactggatattcaacgaaacgt

SEQ ID NO: 23 - DNA, 4524 bp, LACTOBACILLUS RHAMNOSUS
  MISC_FEATURE (1)...(4524): N = A,T,C OR G
attgcgtctgcagcattgattttttctgtcatgacacttgcctccattattacttacattttgtaagttctttacgattatgagtataacaattaatcaataacaatgcaaaccctttcactcgattcgggatcaagtgacggctaaaagtaaggaaagcgctttagtcattgctattatacccacgtcaaggtggcaacagtcaatcaaactgactgatacagagcctgttcgtttcaagcagtttgctagcagactgtattttgacttaaatatttcggtgtccatttttatccatttcaaataacggcggaagctaattgttatcactcgctttaacgcgttccgcgccggctcgcgctcacacaaaaaacgaatgaacgattccatttaatcggaaaagtccattcgctttctatgactcttttacatggcgccgaccgaaaataattatcaactaaaaaattggcgcttattaattctgaccagacaaaactaccttaacttttacacccggttcatcacgattggtgtttttcgtagtgccgctcctggccaatgacaccggtcaaaataaactgaccacgatagtatgccggatcagggcgatagtcatcggcatcatacgggactttatcgctaaaggctgcttcgtattccggtacaggcagttcttggcgtttagttagttgctgggcatgttcggcggcgtgtagttgttccttaaattgtggttgcaaaatgccgctgaagaactctgcgacggcaccggaaccatacgaaaacagtccgatccggtccccggcttgtaatgtcgtatcatgatccagcaacgacaacaaccccagataaagcgacccggtgtaaatattgccaattcgccgacaataacgcgtgctggcttcaaaacggtttttcaatcgctgggcactcgcgtcatcggtggttggcaacactagatccaatgcttttttacccattttggtatatggcagatggaatgtcattgccgcaaaatcatgtgcgcttaaatgatggtcggcctgataacgttcccagactgtcttgaaaaaagcgagatactgttcggttgagtattttccctgagcaagcgccgtatcttggtaaaccggtcgccaaaagtcgttgattgatgccgatcgataaaccgaatccggttcaattgtcagcagacgcggatcagctttgacaatcatcgccactgcgccggccccttgcgtcacttcaccggccgttgctaaaccataacgtgcaatatctgcggcaatgacaagcacacttttatcaggatgactcgcaacataatcacgagccatcatcagcgcagcggtcccgccataacaagcttctttcagctcaactgcccgcacccattcaggcagcaccaaaagatcatgaatgaataaggctgcggatttactggcatcaaccccgctttcggttccaaccagaatcatgcctaaactggcacgtgatgctggcgtcaatacctttgcagcggcattggctcccaatgtcacaatgtcttgactagatggcggaaccgcctgctcgtcttggccgatgccgatcgtatatttattcggatcatcaccgcgaaccttggcaagttttacgagatcgacgtaaaagtccggggtatccatttcgatggcatcaattccgattttcataatttcaatggcctgctttctgttttaatcgaatcgttgctaaatacattttggcatgtgccagatccatttcacctgcgcgtaaagcggcgactagagcaggtacttcctgatcctgagctccggcagcaatcgccagcgcattggcctgcagtttcatatggcctgactgaatgccgggaccggctaatgcgcgcaaagccgctaaattctgcactaatcctaatgcggcaattacctgctgcatggtggctaagtcgcgataacctccaagacggcgggcagcctgggctagtggtaatgcaccgatcgcgcctccgacagcacccaatggcaatggcatttgcagatagccttcaagtttgccatcgcgcattagccaacgcgataacggttgatactgaccagtcgcagcggcaaatgccccaacactgggccgcaaccgcgcgcgtgtcatttcccgtcgccaagactgcaccaatgacaccgttaagaatgcctttgttatgcgttaccgcgcgctctggatcaacaaatgccagatcgctcagctgcacaattttatgggcaatttcatctcccggtagtgtttttgtggccaagtgtcgccggtgccaatttcacagttgccgtaactaaactcgcccagttggcgttagttaaaatgctggccaaaaccgttccatccacccaggttgtcactgcatctgccacagtttcggcaaccgtattcgcataattggcacccatggcctctttaggattaagcgtcaggcgaagttttaaaaaccggttggccaagattgtcacagtcaggttgcggaagccctccgccacgctgcaccattgagggatgggcggcattggccacagctgcgatcgttgcttgatgggccaaaaggatcctagctctttggaataaacggtttgatacatttccggatcttcaagtttttctttgatgtaaggcggcagcggcgtttcaccgagcttatccagaatttccatgaagatgccatcatagtcaaaatggatcatccgtccgccatgttccagctctttggtgaccgtcgcctttaacaacccgtcaccaaaatcaatcactgtcccgactggtgccttgcgcgctggcttcatcaaagtttcccagtcgtcgccggaagtgttattaagtaatagcacttccatgtgggcaccggtttccggtttgacaccataaagtcgtgccggcataacccgtgtgtcgttcatgaccaacgcatcgcctggtttaaaataatccagaatgtcataaaaatgcttatcctgcatcgcgccagtatcagcatttaaaaccaacagacggctggcatcgcgttctttcagcggtgtttgggcgatcaattcatgcggtaagtcataatcaaaatcggaaagttgataatctttattttctacgcgccgataacgttntttgtcttgcaacttgttcgcttccattcatttcatttagttgttttttgatgccgactgctcgtctgaggattgcggcatcgtcattcccatatgggcaaagccagcgggcgtcaccatgcgtccacgaggagttcgtttcaagaacccgatttgcaacaggtagggttcatacatctcttcaatcgtagccatttcttcaccgatattggcagcaatcgttgataacccaaccggtccgccttggtagtcacgaatcatgaaggttaataacttgcgatcaatctgatcaagtccttgggcatccacctgcaactgatcaagcgcatgatcgaccattgccaagtcaaccgggctcttgccggcaacttcagcaaaatcccgaatacgcttcaacaagcgattggcaacccgcggcgttccccgcgaccgccgcgcaatctcgtaggcaccttctgcatcaatcgccatattgaagacatttgctgagcgtttaacaatctcacttaagtcatcaggcgaataatacgccatatgttcactaatgccaaatcgatcgcgcaatggtgccgacaacataccagctcgcgttgtggccccaatcaaggtaaatggcggcaaggggaaatgaaccggatgggcagtcggaccctggccaacgacaatatcaatataaaagtcttccatggccgagtacaacatttcttcaacaatttttggtaatcggtgaatttcatcgacaaacaacacatctccggggcgcaactcattcagcaacgcgaccaaatcacctggcttttcaatggccggtccagaagtggtacggatattcacgcccatttcgttggcaatcaccagtgccagcgtggttttgcctaatcccggcggcccatataacaaaacgtgatccaaggattcttcacgttgcttggccgcagtaatataaacggtcagctgatgtttaacccgatcctgaccaatatattgagcaagccgccgtggacgtaagcttttctcaatttgtgcttcattcagatcatcaatgtcgcctgaaactaaccgatccttgtttgcgtctggcaaaaactcacgccccttctatattgtctgaaaaagtcttaccgttgtcgatgtcctgctgctccagtataatcaacgttatgctcgtccgctcaacaagcgtaaaccttcacgcagataagcatcggtcgtcgtggcgtcaaaggctttcaaagcatcggtaatgccatcaaccgcgcgttgggtgtatcctaaggcaaccagtgcagccaaggcatctgccagctccggcgctacttgatcggcggtcggcatgatcgttgcggcagccggttgagcatcggtcgtaattttgcct

SEQ ID NO: 24 - DNA, 5072 bp, LACTOBACILLUS RHAMNOSUS
  MISC_FEATURE (1)...(5072): N = A,T,C OR G
atttagccgctcaaatttcggcgttagatgtgctgcaaagttttgcgaccgttgccgagaataaccattatgttcggccaacgatgcatgccgggacccatgacattaacgtcaaaggcggccggcatccggtggttgaacatgttttggggcaggacagttatattcctaacgatgtcatcatggaccgggatacggatatgctgctgatcacgggtccaaacatgtccgggaaaagcacctatatgcggcagctggcattgattgtcatcatggctcaagcaggatcgtttgtcccggctgacacggcggatttgccgatttttgatcaaatcttcacccgcattggcgctgccgatgacttagcaaatggcgaaagtacctttatggtcgagatgttggaagcaaatgcggctttgagtcatgcaaccgcatcgagtttgatcctgtttgacgaaatcggtcgcggcacggcaacgtatgatgggatggcattggctcaggcgataatcgaatatttgcacgatcatgtccatgccaagacacttttttcaacgcattatcacgaattgaccagtttatcggattcattggcaaagctgaaaaatgtccatgtcggggcagttgaagaacacggcaatctggtgtttctgcataagatgatgccgggtccggctgataaaagttacgggattcacgttgccaaattagccggtttgccagctgacttattgagccgtgcggatactattttgaaacaactcgaagcggcaactccggaaaaaaccgtcccggcagctaccagccaagtcgaggatcagcagttatcactgtttgaggaacctaaacctgcacccaagaatagtccgattttagccaaacttgctaagttcgatttgatggatgcaacgccgatggatgcgatgaatttaatttttgacctgcaaaagcatttaaagaagaagtgattttatgccaaaaattcaccaactatctgccactttaagtaaccaaattgctgctggggaagttattgaacggccggccagcgtggtgaaagaattggtggaaaatagtattgatgccccaagcnncacccaaattgacgtgaaggtatcagcggccggtttgcaaaccattcatgtcagcgacaacggaatcggtattgaccctgacgatgtggcgacagctttcttgcgccatgcgacgagtaaaattctgaccacgcgtgatctgtttaatgttcattcactgggatttcgcggggaggcgctggcaagtattgcagcggttgccgatgtgacgctaacgaccgctaccgatgccgggattggcgctaaaattcatgtcaaaggcgggcaggtagaaagtcaaacgacagcggcgcatcgtcgcggaaccgatgtcgaagtgagcgatctgttttttaacaccccggcacggctgaagtatatgaagtcgcaacagaccgaacttggcaagattgttgatattgtcagtcggttggcattggctaaccctaagattgcgtttacggtcagccatgacggcaatatgatggtgcggacagccggtcaaggtgatctacgccagacattggccggcatttacggtttgccagttgcgcggtcaatggttgattttcaggcggaggatcttgattttaaggtgagtggcttgaccagcttgcctgaaaccacacgggcatcgcgcaattatctgagtctggtcgtcaatggccgctatatcaagaactttcagttgacgaaagccgtgattgccggttatggctccaaactcatggtcgggcgctatcctatgggcgtaatttcgattcagatggatgccgctttggtggatgtcaacgtgcacccaactaaagccgaggtgcggttaagtaaagaagatcagctcagccacctgctcagtgaggccattcgtgcgcgcttagccaaggaaaatctgattcccgatgccatggataacttgcccaaacgcgagcgttatgatcttgatcaactggaactgacccttaataaaatcagtcttaagacgacagcagtgccgaatcaaggtgctgaagtgcgcgaaaacgccgacactaacactgtcaatacgccgacttctcaaccagcagcgcagacagaagcagcagtcgatttaaccatcaacgacttagatgatcggccaatttttgatgagccacagcgcttggctgcttgggatcagcgttatcaaacgttagacgccaatgttgcgcctgccttggtagaggatgccgcagcttcggatttaaagcgaccggagccgactgaacgttttcccgatttaacctaccttgcccaagttcacgggacatatctgctggcggaatctggggacggcttgtatattttggatcaacatgcggcccaagaacgggttaattatgagttttatcgtcaggcaattggtgaagtcagcaacgatcagcaacatttactggttcccatcgtgctggattactccgcggccgatgcgatcaatatccgcacgcatcgggatgtgttggaagcggtcggcttgtatctagaggattttggccaaaatagttttgtggtcgagcatcatccgacgtggttcaaagccggtcaggaagaagacacgatcaaagaaatggttgattgggttttgcgtgacggcaagatctctgtcgcggcttttcgggagaagacggcgatcatgatgagctgtaagcgggccatcaaagccaatcatcatttagacgatcagcaggcacgggcgttattgcagaaactgccgcaatgcgaaaatccattcaattgtccgcatggccggccggttctggtccacttttccaacaccgatctggagaaaatgttcaagcggattcaagacagtcatgaaagtggggaaatgcaggcatgattattctggcaagtcagtcaccacggcgccaagcattactcaagcgcattattcctgcatttgaaagtcatcctgctacgattaacgaacgggcgttgccgattttgccaccaccggagtatgttcagagtctggccaaagccaaaggagaatccttagtaccgagctatccgggggcaacaatcattgcggccgatacgatggtggcttttcaaggaaagttactgggtaagccgcatagtcgtgcagaagccaagcaaatgatcactgcactcggcggccaaacccatcaagtctatacgggcttgtgggtgcgtctggacaatggcacggttcggcagcaagtcgtggccacagatgtcacattttggccgctcgatgaagccaaagttgagtcgtatttacaagaagacgcctatcaagacaaggcgggtgcttatggcattcaagacgccggagctttactggttaaggcgatcaatggtgatttttacaacgtcatgggtttgccgatcagtacgttgtatcgaatgttgttggcgtaaggcgtttgcgcttttattcaaccgtatggaaattcagaggttataaaaagccgcccttagagaaatctagggacggctttttacggatatagatactttaaaaacttacaacctgccaattactcggtaaagtgaacgtataaatcttgccaatggttttgccttgttcaccggatccggcgaacataatagcggtgaaaatattggtgtactcgagtttctgcgcggtcacggcgacttgcggaatcgtaccgtgtgtcagtttggttttgacggtagtacttggtttaacggtatgaatcgttgcatcacctgaaacacgatattgataggccatgtgtttcttagccgtgccgatggggtggctttgaatttgtaactggtcattcataggcgctagcggttgcaattcagtggtttcgtcaatcgtaaagccgatgtgatacaaatcattcaaactcaaaagtacaaccggtatcataattagcaaggcgctcacagcgattgccaggggtcgacgccggttgggcttcattaataccatcgtccaaaagaaggcaacggcgccaataatcaacagcagaataatcatgatgggtgcctccgatccatggcatcgttattcaagaagaaactcagaactaaccctaaagcggccatgaccagcgaaactgcaaaagcagcgcgatagccggcaagagttgcttgatgcatcgcgttggtgtagtcaattggatccagaactttcccgctagctgagggcgtggcgccttttgtgacgacggataaaaccgaaaccaagatggcggtgccgattgaagccgcgacctgccgaatcgtattgttaaccgcagtgccgtggttgatgagatgggttggcagtgcattcataccggcagtggtgacgggcatcgttaccatggtgataccaaacatccgcaccgtataaatggccgtgatgtaaatcagcggtgttgttgcggtgacagtcatcaatggcagcgtaccggcgactaagagaaataaaccggcaacggccaaacgtttagctccgattttatcaaaaattcggccagtaatcggactcataatccccatcataatggcgccgggaaaaagaatcattccagagtgaaaagcactttcgccgcgaatcgtttgaatgtacatcggcagcaccatttccacgccaaccatggacatgaaagcaacagcggtcaaaatcacactcaaagtaaaggttttcgatttaaaaacccgtaactccaacagcggggttttgagatgcaactgccgccagcaaaaaagggccacaaaaacgatcccaatcgccagactgatgagtacctgtgcatctgtccagccagcatcaccaaccgttgaaaagccatacaataagccaccaaaacctaacgttgaggcaataatggacggcacatcgattttgggatgcgaagtaggcagcacctgacgcatgctgtaaatcgccaaaagaacaacgccggcagcgatgggcataatgaccgcaaacaatgcacgccaggtgtgatgcagcagaatccaaccggaaagcgtcgggccaattgtcggcgccaatcc

SEQ ID NO: 25 - DNA, 1404 bp, LACTOBACILLUS RHAMNOSUS
cagatcaagcaattgactgtgtggctggaatcaggagaatcattcccatttcgtgccccgcggtcaatcgatgactgcggggcttttattttagtttcaacttactggatgtaaaaagatggagggatttacatggcattagtcgatcgtatgaatcacgaggttcggcaactcaaaccgagcgacattttacaattcaatgcagaaattagcggtattgaagggattgttaagctgacattaggtgaaccggattttccgacgccggagcatgtcaaggcggcgggcatccaatcaatcgaaaatgatgagagccattatacccagagcaaaggcttgccgggattacgagctacggcaagccattatctggcaacgaaatataaaacctcctatgatccggagacgcagattttgatcacagctggggccactggcggtatttattcgagtttaacggctatgttgaacaaaggcgataccgtgattatcccaactccgatttttcctttatacatcccaatcgtgttattaaacggagcaaaaccaatatttatcgacacttcggcggatgggttcattcttaagccagagaaattacaacaggcgattgaagccaatcgggacacggttaaagcggtgattcttaactacccgactaatccaactggggtgacttataatcgcgcggatctgagcgcattagccaacgtcatcaagcagtatgaaatttttgtcttaagcgatgagatttactcagaattgacctacagtgggacgcatgtttcgatgggcgagatactccctgatcaagcaattgtccttaacggggtttcaaaatcccacgcaatgaccggctggcgcgttgggatcacagcaggtccggctgcgattattcaacaaatcggcaaggttagcgagtttacgattaccagcgtcaccaccaatgcccagcgcgcggctgaagaggcgttaaaaaatggtatggaagatagtcagccgatgaagcaagcctatcgaaaacggcgtgattttctgatgaaggccttaccggaagccggcttggaagttcctcatccggatggcgcattttatatttttgctaagttgccagaccggttccatgacagctggaagtttgtttatgcgttggcacgtgaagcaaaggttgccgtgattcccggtgccagttttgggccaggcggtgaaggttatgtgcggatttcgtatgcggcctcgatggcggatttgaaactggcggctgagcgcattaagcagtttatggcaacgcattaggtaggcaggtttgcagttggacgataacgcgctcaaaggggaatgatgatgaagaaaattttaatgtatagtgttcgaccagacgaacaaccagcgattgatgactgg

SEQ ID NO: 26 - DNA, 3497 bp, LACTOBACILLUS RHAMNOSUS
catgaaaactccggttcttattttgacggctaaagatgctttgacagataaggtgcgtggttttgagttgggtggtgacgattaccttaccaagccattccaccgtgaagagctcattatgcggttaaaagcattgttaaagcggacaggacatttttttgatgaggatgggttaacagccggtccgtttgaagtccacctaaaccggcacgaagtcttaattcacgacaaaccagtagcgttgaatggaaaagaattcgacttgttagtgtacttattacagaatcaaaaaaccattattacgaaggatcgggctccggcattgttgcagccgcaaccgcttaacagtactgcaggggcggcggtggtcaatcacgttgccagtggtattgtgtttggcgttgaaccgtggaacttcccttactaccagttaatgcgtgttttcgcaccaaactttatggtggggaatgcggtgatcattaaacctgccagcaatgttccggctagcggccttgaatttgaaaaagcagttctggctggcggcgctgacaagggtgctttccaaatcgcacttatcgggcatgatgataccgagacctttattaaagatccgcgcgttgccggtgtctgcttgacgggttcagaaggtgcgggttcgcatgtggcggcgttggcaggtaagtatttgaagaagtcgctgatggaattaggcggtatggatgcttttctggtcttggacggggctgatcttgagcacgtgattccagaagccattaaaactcgcctcatgaattgcggacaggtttgcaccagctccaaacggtttattgtgttggataaatactacgatgactttgttgccggcttgaagaaaggttttaaaaacgtcaaaattggcgatccgagtgatccatcagtcaatgtgggtccgttgaacagtcaaaaggcaaaagataagctgcaaggtcaggttgatactgccattgaacacggagccaaagttgtttacggcaatacaccggttgatttgcctggtgccttcttccggccgactattttaacggatattgacaaggacaatccggcgtatcggacagaattattcggcccggttgcctgcgtttataaggtgcatagcgaagaagaagcgattgcgttggctaatgatgttccttatggccttggcggagcagtctttgccggtgataccaatcatgcggcagaagtcgctgcgcagattgaaaccggtatggtcggtgccaatcagagtcaaagttacaatgctgagcttccatttggcggggtcaagaactccgggtatggtcgtgaacttggcgatttaggcctgtatacgtttgtcaatgagcaaacggtgacccgggcgctgcgtcagtgatctagcccgcactagtttcaagtgaaaaaccgcctttgtatcataacgaaactttgaaaagactttgttgcgcatttggcgtgataaagtcttttttaatggtcagaagcatgagtcaataactggaatttggcgcgaaaaaatttgtagaccaaggaacagcttatggtggcatgcttttttggtgatgaatcggtttttggaaaataattttcgaaaatttttttaacctgtggatggctgatatggcgctgattataaagggggatggtgcaatatgctcgaggaaaattcaaaagtggaatcgatttcattgtatttatatattaacaaattttttaatgctagtattgtataagtagtcagaaattagtgtagggtatgagttaaattctagccagtgacggttctgagtggccgacgtgttagcacctatattgatagataacgcttccgggggacaaggttaattaatagtcagaattcgtttcataactaacacaatttttctcgataagtttatttttgagtctaggagtgattgctagtgaactatttcatcaatttcggtatgcctgccagcaaatcgggtattgagcatgcgcagataaagcgcaagcgcctatttgataagcatggtgaaccttacgtatttcttctacgggattgggaacgggatctacatactaacactgccaatgcaggaattacggatgatcacctcgttaacatgtttgattactatcagcacgcctgccatgttgacgcggtccggttgttaccggagcaggtagacctgggacttaaagatcttcaatattccgatgattacgagcacaatcgtatgttggtttcacgagctgatgggcgattggctgcgcggatcaactatgttcgcggcactagacaggtggtttctgtcgaattgtttgacggagttgagaatctataccaagttgaattttatgatgttcgcggatttaaatcattggttcagtggtataccccagacaataaggttggcaacgaggaatggctaacggtggatggccgtccggtaatcagagcatttaacaagaaaaatgaagatggcaagcttaagcagactgggtggattctgacagatcgcaaaggtaaaatttttcagtttgacacgattgatgcgttttttgaacattttattaatgacatgaatgaaactggccagaatgtctttatccttgatcggtctttattggcggatgaagcgcttattcatctagagaaacccgcttacacgattatgcacctacataattcacatgctggcgatgcgcaacggccaatggattcgattatgaataacaattatgaatttgcattagttaatggtgcgaagtattcagcatttgtttctgcaactaaaaagcaggcagctgatgttcaaagacgcttcccttacatcaaaaagtccttccatgttcctgttggcgtggtatcggatgacgtgcttcaccgccagcgaattctgtcggaaaatcgaatattcggcaaagtcatcgcggttgctaggattgcaccggaaaaaaatctgaatgatctggttcgagccattgccatcgtccacaaacaaataccgcaagtgacgctggatttgtatgattacccggatgcaacgaatcattatgctgaaaaacgaaaaatcgaaaaaacaatccaagaactttcattggaaggggttgtgacttttaaaggctacacggaaaatctggaaagtgcgtatgatactgcccagatttttggcttaacttctatcatggaaggttttgatctctcattactggaggcgatttcgcatggtgttgtcggcgtgacctatgacgttaactacggtccaaacgaaatcgtgcaagacggcatcaatgggtatgtgactccgtatggcgatattcatgccttagcggagaagattcagttattgctatccgatcgtgacaagatgcagcagatgagtacgaatgcatacgaatctgctaacagatattctgaagaaaatgtttggaagaaatggcacaaagttttaatggatgcacaaaagagtgagggggaagtgacgaaatga

SEQ ID NO: 27 - DNA, 884 bp, LACTOBACILLUS RHAMNOSUS
cccggcgcagaagtctgcgtgtaaggaccttggtcgcaatggccaaaaccgggccatcacgcccaaggccgcttacactccgacttctaaccgcgccggctcgcgctcacttttctaggaggtttatcatgcgtacagcaacgatcactcggacaactaaggaaaccgcgataacgattagtttgaaccttgaccagcaaagcggtattgatattgataccggcattgggttcttcgatcatatgcttgatgcttttgctaaacatggacgctttggtttaatcgttaaagctcaaggtgatttagacgtggatccgcatcatacgattgaagatacaggcatcgtcttgggaagttgctttaaacaaacgctgggtgacaaagctggcatcgaacgctttggcaacgcatttgtgccgatggatgaaagccttgcccgcgtggtggtggatctttccgggcgtgcttatcttgtgtttgatgctgaattaaccaatcaacgactcggaggatttgatacggaagtgacggaagattttttccaggctatggcctttgcaggtgaattcaatctccatgccgctgttttatacgggcgtaatacgcatcataaaattgaagcgttgtttaaagcattgggccgtagcatgcaggcggcggtggcgctgaatccggcagtgaaggggattccctcaaccaaaggagtgatttcatgattgtgatcgttgactacgatacgggcaacacgttgaatgtcaaaaaagcgcttgattatctggctattgacaaccaactttcagctgatcctgccgtcattctggctgcagccggtttaatcctgccaggagtgggagcttttaaaaccgccatgtctgcattgaccc

SEQ ID NO: 28 - DNA, 1226 bp, LACTOBACILLUS RHAMNOSUS
cgactatgaccatccgaagtttaattggaagaaaacgcagcgaacgatttttgataattgggttcgccacatcgcggatcatcgcaatgaaaaccgttcgccgattatttagggaggctttattatggtaacagcagcagataatattacaggtttaattggcaatacgccgctactcaagctcaatcgcgttgtacctgaaggcgccgcggatgtttatgtcaagctggaattctttaatcccggcggctcagtcaaggaccggattgccttggcgatgattgaagacgctgaatataaaggggtcttgaagccaggcggcaccattgttgagccaacgtccggcaacaccggcattggactggcactggttgcggcggcaaaaggttatcacctcatcatcaccatgccggaaacgatgagtgttgagcggcgtgctttgatgcgtggttacggagccgaactcattttgacgccgggtgccgatggaatgccgggagcaattaaaaaagcagaagcattaagcaaggaaaatggctacttcttgccaatgcaattccagaaccccgccaatccagacgtccacgagcgcacgaccggacaagaaatcatccgttcatttgatggtggcaccccagatgcctttgtagccggcgtcggcacaggcggaacactcaccggggttggtcgggctctgcgtaagatcaatccagatgtacaaatctatgcgttggaagcagcggagtcgccaatgctaaaagaaggccatggcggcaagcacaagattcaagggatctcagccggttttattccagacgtcttagatacgaacctctatcaagacatcattgaagtcaccagcgatcaagctatcgacatggctcgccacgtcagccatgaagaaggcttcctaccaggcatttccgctggcgctaacatttttggcgcgattgaaatcgccaagaaactcggcaaaggcaagagtgtcgccactgtagcaccggataatggtgaacggtatttgtcgacggatttgtttaagtttgatgattagtaaaaccaatagctataggtaagcaaaaaacagaagcggcgatcaattgagtcagttgatcgtcgctttttgtcttgagaaaatgagcggcagggaagattgcgtgcgtcaacattgaacaagattgttataatggaatctgtaagtctccatggtgcaatggatagcataa

SEQ ID NO: 29 - DNA, 3522 bp, LACTOBACILLUS RHAMNOSUS
cgaggtcaaagatgactatcacaatgatcagcccacaccggtcgaacaattgaaatggtaggtgacacagtttgagcaaaaaaatgctttggaaggatatacgcaaatcctttacaacgtcatggggccgatttttctcgatcttgcttttgatgatgcttgggtcatttgccttggtcgggttatgggttgccggtccggatatgcgagcaacaggcgcaacctattttaaacaatataatttggccgatttaaccgtcattggtgaagatggtttggatagccacgatcaaaagacgattcaggcgacagctggcgcaaagcaggttgaattcggttatcttaaagatgtcacgctcaaaggcacgcatgctagttttcggattatgtcaaaaccggataagatctcaaaatataagcttgcttccggacacatgccgactaagacgaatgaaattgcaatcgatgctaactacaaaggcaaatataagttaggcgacacgattaagtttgtgcaacgagcggatcaaaccggcagcaaggtgcttaagcggacgcaattcaagattgtcgggtttgtctattcgcctgaagtcctgtccgccattaacaaaggcgacagtacttcgggtagcggtgatctcaaaggatacggggtcgtcacagcgaataacttcgatagcgacttttatatgatggcgcggatcacgtatcaaaatacccagaagctggatccgtattccgatcaatataccgatcggattcaaagtcataaaacggctttgaaccaacgattgaaagatgcgcctgcagatcgcttggcggctatcaaaaagcaataccaaaagaagattgatgcgggtcaaaaaaagcttgatgaagctaaggcacagttagactcggctaaggaacagctgacaaccggccagcagcaattagccagtgccaagcagcaaattacggcaaagcaacaggaacttgatacggccgttaaaaatggccaagcacaaattgccagcggggaagcacagttacaacaagcagcgactcaactttcacaaagcgagttgcaactagccagtgccaaacaacaacttgaagccagtcagcaacaactggatgccaaacatcaagatcttgccagtgccaagcaacaattggatactgccaatcagcagcttgctaacagtcaggcgcagttggctgccgctaaacaagaaattgacgcagcgctgacgaataatccgcaaatcgctcaggtgccagtattccagcagaaacaggcgcaatatcaaaatggcatcgcgcagtataaccaaggccttgaacaatatcaaaataatttacaggcctataacaatcaagttgcagcctggaatacggccaataaccagcttcaacaaaagtaccaagaatataattctggcgcgagtcaattccaacaaggccagcaatcctatgcggctaagcaacaagaattagaacaagctaagcagtcattggcgactcagcagcagtcgggacagcaacaaattgaggcagctaagcaagaaatggcctcaaacgaagcaacgctcaaaaccaagcaggctgaatatgatcagcaagcgccaaacgcagaaaaagaaatccaaagtaacagtcttaaacttgaggatgctaaagaagcgctgaaaaatcttaaagcacctacgtacacggttgacactcgtcgtgaaactccaagtgggcaaggctacatggtttatgacaacacttcaaatatcattgattcgctagccaatattttcccatttttcatgtactttgtcgcagcgttggttacttttaccactatgatgcggttcgttgatgaagaacgtatcaattccggtacattggttgcactagggtatagtcggcatgatgtcatcaaaaagtttacagtgtatggtttcctgtccagcttaatcggttcgatattagggatcatcagtggacatatcttactgccattgattgtgtacaatgcctaccatggcggggttaatgttccgccaatcgaattgcatttttatcccggcattagtattgcggcgttgttacttgcgatgatcagtgcggttctgcctgcatggtgggttgcccggcgcgaactgaaagaacggccggctcagctgcttttgccaaaaccgcctgcaaacggctcaaagattctgcttgaacgggtcggctttatctggaagcgtatgagctttacgcataaagtgacggcgcggaacattttccggtataagaagcgcatgtttatgacgatcttcggggttgccggatcagtgaccttgctgttttccggcttagcggttcagcacagtatcggcggggttaatgatcggcagttcaacgacattatcaaatacgatatgatcgtggcacaaaaagacaatatcaccaagaatcaacaaacaagtctggataagctttttaacgaaaaagcggttaagaagacgaaatcagttcattacgaaaccgtcagcaaaaacgctggcgccaatcatgatcggcaagatatcaccatgattgtgccgcagtcaacgaagaattttgacagctacattcatttagcaacgcgcaaaggccaaaacaaactgacccttcaagataatggcggcattatttccgagcggctggcgaaactgttaaatgtcgatgtcggggatacgatcaccgttaaagaagcagatggtacccgtcgcaaagtcaagataaccggcattaccgaaatgtatatgggtcacttcttattcatgaacaaaacagcttaccaaaaagcctttaataccaattacaaggtcaatgggcatttggttaccttaaatgatcggtctatcagtaatacccgggcccatgccgcgcaattcatgaaagaagatggcgttaaaggcgtggttcagaattcttctttgaggaatcaaattacgacagttgtgaaatcgttgaacaagattatgggcgttttgattgtgttggcagctgttctcggcgtcgtgatcttgtataacctgacgaacattaacgttgctgagcggatgagggaactttcaactatcaaggtcctagggttttatgataaggaagtcacactctatatttatcgcgaaacgatcctgctttcgattattgggatttttgtcggctggggttttggtgaactcttgcatgagtatattatcaccgtcgttccgccaaataacgtcatgttcaatcccgccctttcagcgccaactttcattattccaaccatcgtgattaacatcatcaccgttgcacttgggttcttcgtcaattactcgttgaagagagtgaatatgttagaagcactgcaatcagttgattgatgtggcttgaggtctttccccaagcgttctaaaaagaaacaggtggcttaagttggaaaaagaccattgatttcgctatcgcatcggaaacggtgtcgagcagtctcctcgcagtgsctgagttgargktgctcgattttcgtga

SEQ ID NO: 30 - DNA, 1106 bp, LACTOBACILLUS RHAMNOSUS
cgatgggaccaagcaaggatttgacctgcgactttaccagcaacttagctccattgttacggtgcctgtcgttgcaagcggcggtgccggatccgcaaatgactttgttgccttattccgtaatacgaatgtttctgcgggactcgctgcttcaatcttccacttcggcgaattaacgataccgcaagtcaagacagttctaaaacaagcaaaggtggcgattcgatgataccactcgattttaaaaaggcgtccggtttaatcacaaccgtcattcaagacgcaacgaccaagcaagtattaatggttgcctatatgaatgccgaaagccttgagaaaacgatgaccaccggtgaaacctggttttggtcgcgcagtcggaacatgctatggcataaaggcgaaaccagcggcaacacccaaacggttcaagctatcgccgttgactgtgatgcggataccttactcatcaccgtcaatcccgctggtcccgcttgccacactggccacaccagttgtttttatcgtcagtatacagaaaggaagggcacccaatgacagctgccaaacaaagcattaccgaattatatgatctcatccagtcacggaaaagccagccagtttcaggctcatacaccgattatcttttcaccaaaggattggacaagattttaaaaaaagtcggggaggaaagcaccgaggtcattgttgcagccaaaaatcccgacgatgcggcttttatactcgaagttgccgatctgacttatcatgtgctggtactcatggtcgaacgcggcatctcccttgatcagattgcgactgaactggcgagccgtgaaggaaaaatgagtcgcttaaaagagcgcgataaaatcaacaaatattgacaaccgattgccagccagcgctcacgtttgaagctcggccaaaccaaacaagatcacaaggaggcgttgtttatgtttaaacccaccattcatcaacttcatccctatacgccagaaaagcctcttgccgtattaaaagaagaacttggcttgccacagctggtgcggatgtcagcaaacgaaaacccattcggtaccagcgtcaaagttcagcaggcc

SEQ ID NO: 31 - DNA, 982 bp, LACTOBACILLUS RHAMNOSUS
cgcgcaatacccgatttgttagctaaagaccatttataaccagcatgtcatcagtcgattcaagaaaggtattgggatgaaaaagatttggttgggattgggtgttttactattgttactagcggctggctgtggggtttcgcggcaagctgctaagtcaagccgctcctctgcgccagttcgcagtcggcaggccagcgccacttcaacgccgccgcgcccgactcgcttagcacgattgaaggccaaaaacaaagcgcagttagtttatgccccttttggcgacagtctttccgttggcctttttgccgataaaaaaaccacccgctttacgtcgctttttgcccggcaactggcccaattaactggcaaaactgtcaccgaagctggcattgcggaagtagggaaaacggctactaatttgggcgtcccagccttgtcacaactcgtcgcccagcatcccgatgtggttactatcgagtttggcaccaatgatgctgtcggtggcgcaacccctactgcacttaatgcgtatcaacaggcgttaaccaccattgtcaccacattgcaaaaagaaacctcggcacaactgatcctcatgacaacctggtcgccaaatcaagggccatatgttaacgccgatttaaaattcgatgccgtcgttaaaacggtggggcagacctaccaggtaccggtcgttgacttagcaaccatctggcaaggtcatgatgatgtcaccggaccagctggaaccgtcattccggatttttctgcaaatggcccccgggatacattccaccccaatcaacgcggccatgatcaaattgctactcagcttattaacactttggaggaacgataaatgcaaacaccgttaaaattctgtcccaactgtggtcaaccgattaagccggatgatgacttttgtcctaactgcggctttgatttacggtcagcccgcctgcaagcacagcaaacaagc

SEQ ID NO: 32 - DNA, 8995 bp, LACTOBACILLUS RHAMNOSUS
ctccatttgaagacctttaaactttctatccacttcgccgcagaaaatgcagataatgaccggttacaaagactagcatcagcgttgccgcgatccactcaccccattgcaggacactcatcagatcatgcactgcgccattctgggcaaaagccgcaatatatttggccaatgcggtggcggaaatgaccaaggggaacgtgaaggccgcaaaactagggtaaaacgacaaccgcgtatactgccgaatactaaccaacgtaatgaaatataaactctgcgcaaaaatcagcatccctgttgccagccagaagttagggtggtcaaaactggccagataaccggtcagacacaacgaggccggggctgccataatggttaataatggttgagtcgcttcgggcaaaggcacatgccgtaaccggtgaagcacaaacggaaacaaggcaacataaatcaccaacgccatccagaaaagcggctgacctagcgccggtacaaattgactgctggtcaccggaatcacgcccaagccaacaaacgtgacaaaccagctcgggtaaatcattcgccatgctttcggttgtgaaatcaaatgccgcagaacaaagaaaatcatcaacccaaagtgaatcgccaccgccatcagccaaacaatcgtcgcaaccggcaacggcatcccccaagcaacaaagtaagtgcacaagatcatcagcgtcattgaaaaagttggcgaaaccgaagcaataatcggatccttcaaactaccagcagcatgaagcggcgtcaaacaaagcttcagcaaaaccaatccaaacaacaacccagctacgatcccagtcaaatcaccaaccaactgccaaccagctaatttatacaaattccccaacgaagccaaccccaacgtcaaccccgccatgggtaacggtacctgctttaaaaaattacgcataacatcctcctgagcgtgagctggcgcggttagggatcggagtgtaagtggccttgggcgtgatggtcgcactttgaccattgcgaccaaggtccttacacgcagatccctgcgccagcgaacgcgttatgagcgcgaaccggcgcgcttagaagtcggagtgtaagtggcctcaggcgtgatggcccgcacttggccattgcgactgaggtccttacacgcagatttctgcgccggtgagcgcgttatgagcgtgagctggcgcggttagagatcggagtgtaaacgaccttgggcgtgatggccgcaccttgaccattgacccaaggtccccacactccgatccctacgccagcaaacgcataatcaatcacatgctccccagtctaacaagaacagctaacatcaaccaaatgaatcttttgcatcgttaatattcatgaatcgaatattaactccagaaaaaagcgttggcaaatcaacctttcgctgatgccaacgcctatcgacttgttacttgccaccaggacgaccatcaatttaataaacaagctttttttcgaccaagttgattggaattagcgcaattagtaacaatacaacgaacaaccaaaccagattagccaattgaccactcaaattaccatcagctaatccgcgaattaggcccaccgcatgggttaacggcgaaaaccagccaacctgtttcaaccagctggccacatgactcaacgggaaaaacgtgtttgaaaacataaacatgggttgaataaccaacatcgtgtaatagttcagataatctctggtaggtgccatcagcgtgaaagccagtcccaagaatccaaacagggtacctgtaataaacaaaaccattggaattaacattgcccaaaaactgctaatggttcccatcagtagcgccactagcataaatagtgtcccgaagatgacgctccggataccggcccaaatagcttgaccgacaatgatatccggcaggctgattggaccagtgctcatttcataatatgttttgtctaaatgcatctggatataggcattaaccgtactttcattgttggatgcgttcatcgccgtcccagcaatcaaacctaacgtaataaacttcaagtaaggcatcccgtctacttggccaacaaaactgcctaaacccaaacccatcgctactaaatacaagatcggatcaaacagattaggaaaaatagagattttaaacaacttcttgaagctcatccaatcacgatagatcacatgattgatgcttttaatcttgagtttgttcaatatcttcccgcccctcatcaaaatttgtcattttcaagtaagcctcttccagcgtggcataactatactttagcggaagttctttaacaggagcttctgctaaagcgacgccatgatcaataatcataaccgttgcccgccacgttttcgatttcattcaacataattgtgacggtgaagtaaaatggaaaaccgcccccgttttttttaaaaataatttggattcggttgcccaaaaaagaaccatgtgtctttgaattggaaatatttccaaagccccccgggtggggtgggggggttcaaattccccggaaaattggaattcacattttttaaagaggatctcaatttgtgtattaaaggcgcgcccccgggcgcccaaagggaccttaaaaacgggggggaaaccgcaattccctttccttgtgacagaaaactggggttggttggctttttatttttggggaaatgagaaccaaccccaccaaaactttaacaattgctctgctttttcagctgcagttttaaccgttaaatcaaataagataccatgagcgatcatattttctttaacggtcagcgtcgtgtccagtaagtcatcttgcataaccaccccaatcgtccttttagctaatcgaggttgtttgacaatatcgatcccgttgataaaaattttcccggaagtaatggcggtcgtcgcataaatcatttttaaagttgtcgatttaccagcgccattaggtcccaagacagctaacgttttcccgcgatccaaggacagtgaaatccctttaactgcttcaaagtttccataacgcttaactactttttcaacctgtaaaattttcacagccaaacacctccacaaacgaaacaaatgtcgcttttcatgggcttaactaacgcccttgttctaaattttagggcgcagtcatttccatgcgcatcgaaatgtggaataattaaagtgcggttattattcgccgatgaggagattcattttatggcaaaagaattacctaacatcaccaagattgcagtcgctttgtccaatcactcaaaaatgctagtcttggacagtctcatggataaacgcggtcacacgcttctagaaatagcccgcgaagccaacattcaacctcaaactgccagttatcacttacagaacttcattaacaacggttgggttaaaatggaaaaatccggccgcttccactattttttcctagtgagtgatcaggttgccgcactcatcgaacaattcagtccactttcaccatcagcgtcaacccataccttaaccagagcccttaaggttgataaaatgcggactttccgttcttgctacgaccatatggcgggaaaaataggcgttttgattaccgatcaactcttggccgatccgcggaataacttgattcgggtcgttaatgaaatgaaagatgccggattcacagcctttaacattggccctgaaccagaattcttcttgtttaaattagatgaagacggcaatccgacaacgcacttgaatgatcgtggttcatactttgattttgccccgttagatatgggtgaaaattgccggcgtgatattgtccttgaattggaaaagatgggctttgaagtcgaagcatctcatcacgaagttgcgcctggtcagcatgaaattgatttcaagtatgccgatgcacttgaagcagctgataatattcagaccttcaaactggtcgttaaaacgattgcccgcaaacacggtctgtatgcaaccttcatgccaaaaccgcttcatggtatcaacggtagcgggatgcatattaacatgagtcttttccacgacaaaggcaatgcattctttgacccggatacaggcgatcaattgagtgagacggcgatgcattttcttgccggtgtgttgcgacatgcctatgcgttaactgctatcaataatccaacggttaactcttacaagcggttagtccctgggtttgaagcaccggtttatgttgcttggtctggcaagaaccggtcacctctcattcgggtaccgcaatcacgtggcttatcaacccggttggaattgcgctcgggtgattcgactgccaatccatacttagcgatcgctgccattcttcaagctggtcttgacggggttaagaaccagttgaagccggaagaagcggtagatcgtaacatttatcggatgcaagatgacgaacgtaaagcgaaccatattcaagacctgccatcaacgctgcacaatgccttgaaagcattggcggctgatgacgtggtcaaggctgccctgggtaaacatttgtatcaaagctttatggattcaaagaacctcgaatggtctgcttatcgtcagcaggtttctgaatgggaacggcaacaatacctggaattatattaagttcagccacccaaaagctgttgttggcacccgaactgctggctagctaaaacagtcaagcatttaacaatattgagaaggcttcagacagaaaaacacgtctgaagccttcttttgcatttaatttaaaatatttttagagttgaaaacactaaatgagatagctacactgtgtttatcacatttctctcatcttacgctgttataacttggtgctttgttaagttcatacacgtgctgagtcgcgctcaccataacgcgctccccagcgtaggagcctgggtgtaaggaccttggtcgcacactggccaaagcccggccatcacgcccaaggctacttacactccgacttctaagcgcgccggctcgcgcttatcataacgcgctccccagcgcaggaacctgcgtgtaaggaccttgatcgcactggccaaagcccggccatcacgcaagttctcctttatgcccataacgcgctccccggcgcagaagcctgcacataaggaccttgggcccaatgcccaaaacccggccatcacgcccaaggccacttatgctccggcttctaaccgcgccggctcgcgctcactccttataaaaatcttgccgaaataagaaacacatggtataattgcaaatttcttgcattcgtgttatgatgtatttcaagaggtgaagtgcatgccaatcacactagcaagcatcaaacggaagctcgatgggaaaatcggtgagaatttaacggtcgttgcacaagcaggacgcaagaaggttactcggcgtcgggggaccttgaaggaaacttatccggctatttttgtggtcgatctcgaccagaatgaaaatgcgttcgagcgtgtctcttatagttacgcggatcttctgactaagtcaatcaagatcaccttcgaaggcgaagaaaaagcgtcataatttcagatactaaccgacgattaaatcgtttattttgagcaggcctcgatgtcattggcatcgaggccttttgctatcttcttgaaagactgatctgtacaaggtgacgaatttttgacacgcggcaatgaaaatccggacgcaaaacagtatactgaaaataacgatacggcggatgcatgcatcgtcgtttgcagtgtgagctctccctgtaaatacatgcatcgccagagactggtggttagatggaactgatcgagaaagcgccggccaagattaatctaagtttggatgctttgtatcgtcatgctgacggcgaacatgagtggcagatggtgatgacatcagttgatttggctgattacgtgagcattaagcctagccatagcattcaggtttccacagatagcggttttttacctgaagatccgcgaaatctggcctataaagcggcattggcttaacttctatcatggaaggttttgatctctcattactggaggcgatttcgcatggtgttgtcggcgtgacctatgacgttaactacggtccaaacgaaatcgtgcaagacggcatcaatgggtatgtgactccgtatggcgatattcatgccttagcggagaagattcagttattgctatccgatcgtgacaagatgcagcagatgagtacgaatgcatacgaatctgctaacagatattctgaagaaaatgtttggaagaaatggcacaaagttttaatggatgcacaaaagagtgaggggaaggtgacgaaatgatttacatggttggtgaaaatgttttcacatttaattccggcactgagttctcgcagctgcaacgcctgaaagccttcaatcaaaatggcattgaatctaaactgctactccggaactataatcgcttcttgtatcgggatgccaagcgtgcaggagttaacaaagatgcatatatcaacatgtacgattattttcagggtgttgtcggggttgagcgtaaagaacagaagttacgcttactcgaatcgattcccctgacgaaatatcatgtcgttgggattgacaataatacgacaactatcgatctgttaggtcgaacgcttgcaaagattactgtcatgccagagacggtcggattagttggaagtattgattattatgatcgctttgatcacaaagagttaaccgaattctgggattggcgcgggtttaagtctatggaacaaaattataatcccgatggaaccgtggctgcacagaagtttttggatcagaaaggccatgtggttttggagattatccacatgaataaaaatggtcagcttgcaccgacaatgtggaagttggttcattatcaaggacatgattatgtatttgattccgaagatgacctgttccgttttttcctgaatgaaattagtaaaggcaatccgggaatcatgatttcagatcgcagaacgcttgatgctgccgtcaagcaagttaaccatgcaactgctaagctcgcttttattcatgaaggtgacctgttcttgaaaggagaagggaagaagcgcgtacctaatgtcatttacaacgaggtactaagcgagcagcatccgtttagtaccgttatttttcctacgcatgatcaagttaaagcgattgagactcaatatccgcacttaaccattgcggctgccccggatacttatgcacagacgccgaaagccaagaaaatacaacccgatcatccacgattggcgtatatcgggcgtctttttccagataaacagattacggatttggttgatgcgtttgaacgtgtacaccgagaacgtccggatgctgaactgttcctcaaaggttatttttcagacgaggcctatcgccgggagatccgcgatagaatccacaagaaaaaacttgatgatgcgattcatctggttgcctatagcaatgacaatcaggatattttggacaagacgacgctgtttgtttctgcggcgaagtcagaagctttcggtatgaatagtcttgaggcaatgtcgtatggcataccagtggttgcatacggatgccacttcttgaagcataacctgttagtgaacagacaaaatggggtggcggttgttaatatgacgcctagcgagttaggcaaggcgattttggtcgtgttgcaagataatcggctttatcacaaattacaagctggtgctttaagtactgcaaaacaacattcagaagctgatttcatcggtgcatggaagtcagtattatcagcgttcttttgagatgactcccggttcgcttttgcttgcaagtactcaggaaaggggatgatcgcaccacgagaaactatttaaacagttctaagccggatttttaaatacaagtaaaaaatcaagtgggttgctcattatttattgagaggatcttgggtatgaaaaagataaatagagcaaatgttttggtggagaaaaagcgtttcaagatgtttaaggcaaagaagaaatggttaattgctccattattcttcatcggcatcggtttggggaccgcctatcagacgaatttggttaaagctgatgctcaagcgcccaacagttcagagtttaccgaagcgccttcatcgggagccagtagtggtcaaaatggaacaaatagcctgaaatcagcaagtgcaagtgtagctacagccagcagcagtgcgagcgatggtcaagccaaagcgagcacggctaatgtggcaacgaccactaatagtaaaattggcggcagtcaaagtagtgccaacgcagccagtgcgtcttaaagtagtgctagcgttgaaagtagtggccagatcaaaagcactagtttagccagtgctggcagtaacggcgaaaaagcgaccagcgctctaagcagtagtgcagttgatgccagcgatggtcgtgcgagtcagggtgttggcggcacgtcaagtggtagttcagatactacgagtcaggcaaatgaaggcaacagcgccgccagtgtaacaagtgcaagcgccaatagtgcctctgcaacaaatacatctgaaggtcaaactccagttaatgaagcggtatcaaacgatgcttctagcgccgatgtcagcaccgcgtcagagtttgatgcagccatggccgattcaacggtaagtgtcatcaacgtacagtccgactttgttatggatgttagtggtgatcaacaaaggcaccaaagttggtcaaacgagcaaccttgccttcaacaacatcaccaggctgaatttttgcaaagatttctttgcgtgcttcggctttgcttgcttcaacaattgcccgatgtgaaagaatcaaacggttttcactaggttcaatttcaataatcttaaattcgagctctttgcccttgtattgattga

SEQ ID NO: 33 - DNA, 2346 bp, LACTOBACILLUS RHAMNOSUS
ctcctaatcgatctaattctcgaaaagctgcaacatcttctgcatttaaggaaacagccttactaatctgggtcttgccttgcttaaattgcattccaccaatgtttaatttctttaatgggatgccaccttttaccagatcaactacttcacttggattggtaaacaaatagaacactttatctttgctatatttgggattgttataaacagcaatcgcctttggtacatcaacaatattgactttcatgcccggaggtgctgcctgctttaacaaggtcttacgaatatcgtccttataaacctctgaactgacgatgatgatacgatccgcatttgattctttagaccagactgttgtaacctgaccatgaattaagcgatcgtcaactcttgcaagcgtaataatcatcagaaatcatcctcctttgcatttgctgtcaatttttcgctaaggctcgttgagaattcttctttgctcttcattaaatgtgatactagttgaccaacatccatactatttgcgttaactgcaacctccaataacatgggcaagcacattccagcgacaacatcggccgctttctttttcaaaactaattctgctgctgcattgtaaggtgttcctgaaaataaatcggtaataattaaagtactagacgcctttttaggatcaatcgctgaaataattttattcgtcaacgattgcaaaccctctttaggtgtaaagtctattggatggaaatttggcacctcaccataaatcatctccactgcttctttaaaggcttttgcagtatgtgcatgcccaactaaaattatttccatttctatagcacatctccaatcttataaacatgttttaaccgcgtgattttccgcctgcgacattagttgtaaccccagtgatgtagctagcacgattggaaacaaaatagttaactaagtcagccacctcacttagtttgccgcttcggcccattggcgttgtagatgtggacttatagcctgctcgaattgcttctacagttgtccctcgggtgtaagccaatgcttcttcataatcgggagttcttagccctgtagcttccatgatgccaggcgcgacgccaacaactcgaatattgaatttacctaattctttcgcccatgaacgggtaaaaccgttgatagcacctttactggctgaatatacgctttggccaacagaaccttctagacctgcttcagaagacatattcacgataactccgtgacgttgcttgaccattcgccgtactgcagcttgagaaactaaaaagacgctctttacattgacgttgaatatttggtcaaatgtgtgaacatcaagttcatacttcccatgcggatctttcggatcaactaaaacacgtggtttgttaattcctgcgttattgacaaccccccaaatctccccgttaatctgtgttgccactttagcaagattttcaacagcctcaggattagtcacgtctgtctttacgtatgttaagcgtggatcctgtatagatccttctcttaaatcaccattaacaacatttgctccattttgcagtaactctttgacgattgcttccccaattcctgacgagcctcccgtaacaataattgtcttccctaacaaactgagccaatctgacatgatatttctcctttcatcattcacaaatgttaaacttaagttgttactaatttcacttttgattataattggaatgtaatcggttacaacgtgactgttgaataatttcacatttgtgatttcgaggtgacatcaatgtcaaatttgcctaaacggtatgatcgtgcaactttagtcaagatatccgatcttttactacatgcacggtctaactcaacaagaaatatctaacattgcccatattcacagaaccgaaataagtcgaattctgaaggcggctagggatgaaggcgtggtatctatcgcaatcaatcccgaaaccaccgccgtcagccaacttattgatttttttaaacaaaaatacaatttgcgagaggccgttatagtcccggcttctgaaaatggaggcaatgagttaaacgctttgagtgtttacgcatcaatgtttttatcaagaatcattaaaagtggtgacgtaattgggttaagttggggttcaacgctttcaagtgttatcagtcaatttccaacagataaaggccttcgtgatattaaagttgttccgctggtgggtggcccaatgggaagaataccttcgaactatcatgtgagctatctgacacaccggctcgccaatcggctaaacggaacagcgtttgtcttggattcccctgcctttgtca

SEQ ID NO: 34 - DNA, 4408 bp, LACTOBACILLUS RHAMNOSUS
ctccttcgaaccaatattttttggcgattaaacgtccccataatcggtgctgggtatcggcggaaaaaacccgcgagttgtttccaaaaaaaaaaaccgtacaaaaggcgaagtttagggccaaaacaacccccgggttttccaatttccccaacaatgggcgcaaaaaagcgagtcaaaatggttggcggcagcttcccagccaaattccaaaaaaataaggggccggcaataacgccaccgccagtaatgagtgtgaccggaatcagctcgaacgaacgggaaacaaaatccggcaccccatccggcatcttgatcgttaagtggtgagttttgcaccagtgatataactcaaccgtcagcaaggcaacaatcatgccggtaaataaaccgcgagcgccaaggttggcgacatccagttggccggttttgttaaaagttgcgaccatcatcaaaaaggcaaaacccgacaaggtgacacatccgggaatataaagcttgtaatgattacctaagttgtaagcaatggataagcaggcatacaagccgatcatcccgatggacagcttaacaggcaggtcgaacagcgcggcgttgccagtaatgaactgcgaaacggcatttttagggccgagcatattcggcagtgcggggatgatcgtgaaaatactgccgagaatcgtgaacggcgtcatagccaccatcccagccttaatggcactcagatgacgctgattatccactttatgggcgatgggcatgaagaagcggttcataaaagcttcgaacttgttaaacatcgtggtgcgctcctctcaaaattttgatcagccactaaccggcatgcttcttttgatattttgcgtgagtcaccagcgccagtttcatcaccgtggcaccatccatttgcccgtaaacatctttatcgatgacggcatacggaatatggcgcggatcacagatttccccaatatagccagtcttatgcccaatctggggaccgaccaaaacaatgtcatagttgtcgatttcttcttccagtccatcaaccggaatagcattaaaatgaaaatccgcttcgttcagtttgcgactgtctttaacaaccttcgccatattttgcatcaacatattggtggaaaagccacctgcacagcataaaagaattcgcatgattttgttctccttgtatatttattaatgtgagcgcgagccggcgcggttagaagcctgcttcattcacgctctagtttcaaatacctcaatcaacgtttcgatcaaatctcgtgccagttggctggtcatgtagtgatcttgcgcgtggaccatgagcagacttacgggttcgggcgtctggtccggtgcaaactcgcgcgcgatcatggccgtttgtgcgttgtgggcggcgacatcaatggcttttgactcggccagtaagttgcgggcccggtcaaagtcttgcgttttaacggcagccaatgcttcaaaggctttggttttgctttcgccggcgtttgcgatgagctgcataatttcgagttcttgagtagttgccatagggggtggactccttcttacaaacctgcagtgggtgggtgcagatgttttttaatcgttgggcgggcgctagtggtgaaacttttaaaaggtatgtgccgcggccacgagttttgctgataattggcggcacatcgcagcgtataaagcaaccatctgatcaacatcgcgggtgtgggcaagcgattgagcgcaatggccgtaacggcaagggaggattgtgaccaccgttggaatgccggatccgactttgtgtgcctcaccaccatcggtaccgccgccattaaacatatctaattgcaaagggatttctgctgcgactgcggttgctttaacaaactgttgcagacggcgattcggagctaaggtgcgatcaaaatgggtgagaatcggccctttacctacttggcgctggttaacttcgccacgttcccgtggattttgaaaagttgccacatcgacaataaaagcgagatccggtttgatcagctgggtggcagttttggccccacgaatgccgacttcttcactactagttgcggcaaaatgcaaggtgaacggcaatttttcatctgccagttctgcaagcagttgtgcgccaacgtagcaaccgaggcgatcatctaaagctttgccgccaaagacgtcatctggggcatacgcatgaaacttggtcgcaaacgtcaccatatcaccgattgcgatccccaaggcggcgacgtcatcagcactgtttgcgccgacatcgcataacacctgatcaaatgccggcaatgtgtcatcgcgaatgaccatgccaggcagcttgtgacccgcggcggttgtgatgcgtacgttttgccagtgactggcggcaggtttaacgccgccgacaaccatcagacgcagtaggccttcaggggtaatggtacgaaccatgtagcctacctcgtccatgtggccataaagcatgactgaaaattgcggatcagcggcttctttggtgaaaataaggctgcctagcccgtcagtttggctggtcaatccatatgaggcaaggtgatggcgcaaaaccgcgcgcacttcgccttcgttggccgcaatggcatcagcgttacttaacgccgccatcagttgtaaatccatgtcgtttcggctccttccagttcagtccgtaaagtttgttgaaatgcgctaaattcggtttgttgaactaattgattgatgagatcaggcttttgcattaacgcggccaattgggtggtcaaggttcggtgtaagggtaattgatcctgtttcaacgcaatcaaccacaccatgcgaaccgggcgcgcgctatttttgacaccagttggcaaaagcatcacggcgaccgcatttttcctagcgctgaatgacaagggatgcggaatggcgatcccgttgtcgtaaaccgtcgccagaaagtcttcgcgctgcagaaccgatgccgcgtaaccaacttgtccgcaataagccgccattttggcagtgagggtggtgagtaacgtccgatagtcggcaggcttttgatctgggaaaaatagcgttggctgcaacaaatccgccagggacgctgtggcatgatgttgcgatgccattgatagctcgtgtcgtaaacttgcaaagtctaaatccgaagccacttcatcaatctgaatcacgggacagtcaaatgattcatttaaagccgtgacggtaaaaagcaagtccggtgaaagttggtggattgcttttaactcattgaggccaaaagtttgaatcaccgcctcaggaaaaatccgtcgcaggcgtaaactcagcaacgttgcaattccgccgccagtcccgcagatcacggcaatgcgataaccatgccggctccatttttcgtgagcctgttcaagtggaaccagcaggtgggtggttagatagccgacctcggtttttggcacctcgatttggtattcgcggcttaaccattgagcaaattgaactgcccagttagaggcgatcgggtaatcgcgcgccaaaggttctagactcagaccggccagactttggtgttctttcagtcggccaattaaggcgaggacgtggaagtacatgagcgacaggaattccggatgagtggcaaagttggtttcatggcgtgcatccagcgttgtgaaataagcgcggagtttcacttttagccgctcgtggtccaggcgggtggtcagttgtttgcgtttggcggcaaaactgacggttaaaaagtcccacgcctccggacttaggcgaatagcggctaaaatcgctgcaaagtctgtatcagcaggcggggcgtgtaacgtttggcccgtgacgactagcgaccacccaatttcgctggcaaactgcgtcgtgacagccggatcgagtcctaaaggctgcaggattaccaattgccacagcaatgtctaatccgatgtatagctctccgctatttttgacgtgcttattcagccaatctttaaccgcttcagaaataggcatcaagccttccatcaggattcggaccatccgcggcaagataaacatgacggcgcctaaattaacaccaatttggagtatgccacgaacatcataaccagctaacacaccaagcagaatcccgagaagggttccaatcatcattggttcacccatgataccaaagcgcttctgaattgtctgagggttaatatggattttgtttaagccaggaatatgatcaataacccagtttcccagtaagcctatgggccaaaaagtaattgatgaaacggttggcaataaatgccctcaaggccaaaatatttttcgcctaatggtgctgcccagtcagccagtttaaagacaatcaccgtaatca

SEQ ID NO: 35 - DNA, 5772 bp, LACTOBACILLUS RHAMNOSUS
  MISC_FEATURE (1)...(5772): N = A,T,C OR G
gaatagagtcgcgtgaattttataaagggggcgccaaaggggtcgcacgagatttctataaaaaaacccctattagtggggcgcggtgcaccccaaaaaggggggggttttttttaaaaaagatttttacacacaaaaatatttttgtggggcccgcgagaaaatattctaaagaagggggtgggtgcaacatatttttgacccccaaaaagaggcgccccataaaaggggtttttttgttgtaaaaaaaaggggctgcccccccaaattttgtgttctcaattttataaacctggttgtaaaaagagaaattatttttaccgcgaaattttttttaacgcggggcccccaaaattttcccccggggggtttttaaaaacacacacaatgtggggttgtttttgggggattttaaagagcccaaaaaaccgcgcaagaggggatttccccagagaaaaatctccctgtttcagaacaggcccaattttccggttttaaaaggaagaggttttttcaatggcccggaaaaaacccttttgaattttccctttttcccgggccaaggttttacttttcgaagggattggcttaaaaaaaagaaccaaatttgccaaaacggtttttaattttgaaatccaattttaaaaaaaggctttccgccaaccccctgggtgcatttaaaagggggaccggaaagctttttttatttatgcccaatgcgcgggcttttgaaggctgcaatcaaggccgctttatcgggtgaaaatggcaccgttgagcttaatcaagccggtgggtgtataagttgagataatgaaattggttttctgccacttcttgcaaggcggcgagcttcttgtgattagtagcgcccagacgccgactgtctgtatagagccccaggatcgccgaatgcgggtcactgctattttcattcgcccaacccacccagctacgatgcctgagatgacaacaaatttcgacgctatccttgctgaccccaacattgatgttgtcgttgaggctattggcggcttgcatcctgcttatgattatatcctacgtgcactgcagcacggtaaacatgtggtgaccgccaataaagctgtcgttgcgcaacacctgcctgaattcatcacaacggcggctcagcatcacgttcgcttttattttgaagcaactactggtggtggcattccctggattcgcaatttggaacgcgctgctcgcattgaccaaatcgataccatcgaaggcatctttaatggtacgagtaattatattttggatcaaatgcagcgggcgcatctcgattttgacccggttttgttggcagctaaagacatgggctatgccgaagccgatcccagtgcggatattgatggtgacgatgtggttaacaagctgaaaatttccgccgcactggcttacgatatgatcccgccgcgtgatgttcctaaatttggcattcgtaatgtcaccaaagccgatattgactttttcgccagtcgtcaccaggttttacgtctaattggcaagagcagacgagttggtaaccattatagtatggtcgttgaaccgcgtctttatccggcgactgctttggcggccaacacgtttgaaaacttcaacctgatccgactgcacggccagaccattggcgatttgcagttttatggtcaaggcgccggtaaatatccgactgctaatgccattgttcaggatctattcgacattctggaaaatgccccgcatctgacgcggcactttgatcagaacttacaattcgatgcagatctgaatactgctgattacttgctgcgcgccgatccgctcacgtttgccatgtttaacgataaggacaccgaagtcgttcgggatcatcttttaatcaaacaaatcccgactggtgaaatgcatcggctcatgcgtggggttttggcaattgatgctcatgccttcatggcagccattggcgatagtgaactgaccacccgtaacgtcaaagaacaagttgatcagggggtaatcgaatgaaagtcgttaaattcggcggcagttcggttgccgacgccgggcagtttcaaaaagtcaaagccattatcaaccaagacccgcagcgccaaatcgttgtcatcagtgcagccggtaaatatggcgatgcaacccgcaagttgaccgataccctttatctgattgcggatggactcgaagccggtcgtgatgttaccccgctttttgctcaagtgaccgcccgactggaagcgatcaatcaggctctacatttgcatgtgccactcataaaactcatgaatacgattcgtcatcacatcgccactcattactcgcgcgattattctggtttcgcgtggtgagtttttaaccggccccaactgatggctgcctatttgggctatacccttcgttgatgctgctgatctcctcttttttgatcaaaatgggaccattgatgaagccaaaacattagcggcttatcggcggttaccgcgtcatcacgggatagtcgttcccggattctatgggcaaaatgctgccggtcacgtacaactcatggcgcgcggcgggtctgacatttccggtgcgtggttggcgcggctgacccaagctgatctttacgaaaattggaccgatgtttccggaatcaaaatggccgatccgcgaattattcaagatgccgatagtattgacgtaatgagttatgatgaattgcgcgaattgacctacatgggcttcagtgtttttcaggaagaggcggtccagccagtgcgagaaagtggcattccaactcgcattcttaatacgaacgctccggaagatcccggcacattgattattcaagatgatgatccggcaaacgatatgcggatcattaccgggattgccggtcgcaagcattatctggtggtgacgattcggcaatatcaactggcattacatctcgatatcattcagcatgcactggacgtcattgctgatcatcatctggtcgttgattatctccccaccggcattgacagttttagtctgttaattcgcgaaccacgccatcaggtttccgttcacgaactcacggcagcaattaaagcagcgtgtcagcctgataaactcgaggtcaccgagaatgttgcgctcattgcgatggtttcccgaaagttacggcaacgaccggcaattgccggtaaggtcctcgcctatctagacgacaacctgctcaatgtccagcttgtcagccagaccaatgacgacatcaatttgttaattggcgtaaatgataaagactacgacaaagccatccgcgtgatttatagtagtattcatcaaaattttcaccgcccggcgccatacattgaaggcattgcttagtgtatcccgccgcgtattaatttctttagacatcaaccaaaaagtggctccgttgcgattttagaacaatcgcaaacggagccacttttttaattaagatcaatcattctgaatttcactcatgactacttttgcttctcggccatgcgcgatggtgtacttgatgccgcttgctcggtagtggccggttgatcactctttggcgccggtgctggttgcttggtgtcaggcgctttggctgctggttgctcgtggtgcttgatcgcatcgacaaccggttgattgccagcctgatgcatcagtgcgccatttaacatcccgcgaatatcgatgccggcaacttcttgcagcatgtccagttgcttgaccaaactgccgctggtttgattcgtcaggtcgccatcgccataaagcttaatcgagtcaacatttgcatacggactcatagcagcctcaataatcttcggcattgcttcaatcgtcatcttgaagcggccagattcatcaagttgccgtgctgcttccgcttgtttagcaatcgcttcagcttgagcaagcccgatcgccttggtcttgccggcttctgcttccccaatcgccttggttgcatttgctttggcttcggcatccaattcaacctcttttgctgatgcttcagcggccgcgatctgggttgctttttgggcttcggcggcacgctgggctttatacaagtccgcatccgcttgtttacgcacggttgcattcaattcctgttcctgcaattcggcgttcttttgtgctagttcaatatctttttctttttgaacctgcttggccttcatctgttcaacaatcgcggcctgatcagcttgcgcctgcgcaatttcttgttgctttttgaagtcagccatcttgacctgctgttcccgttcggcgtcagcaatttgggtctgacgttcgatttcctgctgctttgcttcctgatctgcttgcgcctgttgaatccgggtatcgcgattggcggctgcttcggctacagcggcgttctttttaacttccgcaatttgcttcttacccagtgagtccagataaccgttcttgtcggcaatatctttgatcgtgaacgaaataatctgtaaacccattttggctaaatcggaactcgccacatcctggaccttttcggcaaaggcatcacgattctgataggtatcctcaaccgttaatgtgcccaaaattgcccgtaaatggccttccagaatttcggtggcttccgaattaatctgctcgtcatttttgcctaaaaattgttccgcagcggttgcgacttcttcctgactggagccgatttttaaaataaccgtcccgttgacaataatcggaaccccttgttgcgtgtagacttcaggcgttgcgacttcaatggtccgcgtattcagacttaaaacgtcccagcgctgtaaaatcggtaaaataaaagatccgccgttggtaatcaacttgacacgattgccattgacatcgcgaaaactgtgcttgccggaaattagagcaccggaaataatcaagacttcgttaggcaaagcggtcttacgatgggtggccaggaaaataaagagcaagatcaataaaacggccgcgataatccacggcatataatcagttaaaatttccatcagatccctccttagggttgtgagtagccaaggcatcaacataggcaataccttgtttgagttcaatgatcacgacttttgtgccctgatttagcggctggcttttatccgaccacagcttggccggatatgtctggcgggcccgaccaccaccggttaccatgacttcgccagtgtaatgatgcgccacatctaacgtcagcgtaccgagtaagtaatcccgatcgctcattgatgtggtgttctcaaccggcgacagtagccgttgcaatacgctaaatacgggtaacagcaccagcgatacaacnatccataagagaccgccaatgatcaatagcgccaccaccccgacgatcacctgtaaccacagttcttgctgtgcccaccatgccaacacgacactcgcctcgctttcaaagggactaaaatcttcctcattttatcatgtaaacggttatacgcaaataccaataagaaaaatatttagtgttgctttgcatattaactgcgaagccaacaacccgtctctatgtagtttcggtggcatgaagaagctactctttgtttgccaccgactaaagcttcaaaaatcacgtatattgcgtgaatgcttttcgacctcccattagtcgtaatgcaaggcatagtcttccgatacctgatagtgcagtgttttggtaaatagcaaattgctaagataagccagtccaatcggcaagatgaagaaaat

SEQ ID NO: 36 - DNA, 1330 bp, LACTOBACILLUS RHAMNOSUS
gacatatccttagatgtttgtaaacggcgcttgataattttctttattgtgaaacaatgaacgtgtaatcaaatgatgagcaagtgaaggagagattgcaatgaaaatcaaagcagccgttgttgatgaaaaaggtgctgattttaaaattcgggacgatgttgaactagcgccgatgggtcctgacgaccttcaagtccatatggtcgccagtggtatttgccattccgacgaagccttacgtatcggggatgccgttatcggctacccgatcgtactaggccatgaaggttcagggattgttgaaaaagtcggcccggaagtcacccagttcaaacctggcgatcacgttgttttaagcttttatgcctgtggcaactgcaagaactgcttgaagggtattccgacccagtgtcttaattacgcccataacaatttgtccggtacccggccagatggctccgcgcacttcactgaaaatggcaagccggtcgcagacatgttcgaccaaagctccttcacaactaccacggtcgttcgtgaacgtaatgcggttaaagttgacaaagatcttgatttgcgcaagcttggaccgcttggctgcggctatgtcacaggttccggaaccgttttgaatacgctcaagccaaagcctggtgatacgattgcggttaccggtactggcgccgttggattagccgcaatgatggcgggcaagatctccggatgcaccaaagtgattgcgattgacattgtggattcccgactcgaattagccaaagaactcggcgcaaccgatgtcgttaatagcaaaaccgaagacccggttgccgcagttaaaaaattgactggtggcctcggggttgactgggctgtcgacacaaccggcgtcaaggcagtgatggaagatacgatccagatgctggctcagggtggtaccaccgcaacgatcgcggttacgccacatcatattgacgttgatacctggaacgacctctgcgtcaatgacaagaagatcgtcggcgtcaacatgggcgattccatcccacaaattgacgtaccgcgcctaattgagttctataagcaaggtatgttcgactttgataaaaccgaaaaattctatcaattcgaccagatcaacgaagccaatgctgactcccgctctggcaagaccattaaaccggttttgattattgataaagactatgtaccgggtaagtaattgatcttttcccttggccctagctgtggtttgaattcaagcacaaaataataaagcaccaggaactccaacgctgagtttcctggtgctttattgtgttcagtcttc

SEQ ID NO: 37 - DNA, 1605 bp, LACTOBACILLUS RHAMNOSUS
gactccaccgcsgtggcggccgctctagaatcgcttaactattgcggcttatcatcccagtggcagcttgtcgtttgtgaatggcttttcttctacagtcgggtcgtttgcgatggccggcgtcattgtcggtgattatgcgcagttttccaaaaagcgcgatgatgtggttaaagctgctatttttggcgttattcctgctggtgtcctgatgattgcggttggcgcgattttgacgattgcgtttaagtcgacggatattagtagtttgtttatgaaaatcggttcgccggttatcggtggtctggcgcttattctcggcacgtggaaagtgaacgttgtgaatgcctattctggcgggattgcagtggcaaacattttcaacatcccggagaaatatcgcaagttgacgctgttcttggtgggcgtcggcggcacgattttgtcgattctggggattttaaattattttgagccggtcatgacgatcttttcagcgatgattccaccggttgccggagcgatggctgcgtcttattgggtgattcatcgtggtgagatgcatagctggcagccggtcgccggagtgaactggcttggcttgaccgcgtgggcgctgggtgcggtgatcggcgtgctgcccgtgcggtggccggcgatcccaaacattccggtgctcgggattattcttgcgtttgtcctgtattatgcaggcgcaaagattcatccagaatgggacaaagcatcagagttgaactagcaggcaaacattgaccaaggtgatcccaaaagaatccactttcggttgtttagcccagtgttggtgcgcgactcgtatgacttagcggactgaagataagtttaaaaggagaacaatatgcgacttttagatcaggaatccattgaaaatatagcgaccggcgcggcttttttcggtgctggcggtggcggtaatccgttcttgggtaaattgatggcccttgatgcgattaaaaagcacggaccggtgaagttgcttgatgtttcagaaattaacgatgatgattatttttgcccagcagcgattatgggtgcgcccgcggtcatgatggagaagattcctaagggtgatgagtttgaacgggtttttaaaatgttaagccagtataccggtcatgagtttgtaggaacttttcccatggaggccggcggggtgaattcgatggtgccgattgcgctggccgcatcgctaggaattccactagtggattgcgatgggatgggccgcgcgtttccggagttgcagatggtgacgttttacttaggcggcgtggcagcaacgccgatggtcattacggatgaaaaaggtaatgccggcgtgattaaaacgatcagtgccaagtgggctgagcgattggcccgtgtacaaactgtggaaatgggtggtagcgcaacagtagcgttgtatccttcgaacggcaagcagattaagcaaaatggtattcgcggcattgtcaccttgtgcgaacaagtaggcttgcgaattcgcgatgcccattatttaagactgcaggaattcgatatcaagcttatcgataccgtcgacctcgagggggggcccggtac

SEQ ID NO: 38 - DNA, 477 bp, LACTOBACILLUS RHAMNOSUS
atggctaatgaagttatgaatcgtcgtaataatgagttgatgaatgatgttaatgatccgttctttgacaacttggcgcgtcggttcttcggcccggtatctgactggatggattgggcaactccttccattgtcagcacggccgtcaacggattgctgactgacgttaaggagaccaaggacgcttacgaagttcatgttgatgttcctgggatcgataagaacaacatcaagttgaactaccatgatggcattttgagcatcaatgttcacaaggatgacatcacagatcacgccgacaagaacggcaacgtcatgatgtccgaacgcagctatggcacgatgagtcggagctatcaactgccaaacgttgatgacagcaacatcaaggcaaactacaaagatggtgttctcaacatcacatgcccaaagttgactgaatcaaaggagtctggtcacaacattgaaattcagtaa

SEQ ID NO: 39 - DNA, 15054 bp, LACTOBACILLUS RHAMNOSUS
  MISC_FEATURE (1)...(15054): N = A,T,C OR G
gcaacttttttcatgttgtacctccttgtttgaaatcgcttacatttatatgatgaattttagcacaaggcggctgtgttagtacacgttttttgatgttaaagtcttttagattagtatattaaaccaacccagccataccacccgaatcaattgttttcccgcacattccacacaagtccgatatgccaatttctgctttaggacaatcagcttcgttatcatgaccgaactttcacgaaataaattatatgcatatgctcattaatcgtcgtttcccgatctggtagctgctgaaaaccgactttgcgatacaaatgtaccaacttgggttcttccgcaatcgtgtctacataccatgtttgaatgagcggaaactgttcttcaatcaactgtagtccgagctgagcgtatccctttccttgataaaacggcaagattaaaaatggtgaaatacgggctgccgaatttttgagatctgttacaacgcgaatcaggcctatgtgtttatcttcaacggttataaagaagaaggcattgttaggccgtttgaactttttctgtaagcttttcaacgattcacagtagggattggtttcccgatcttgatatttgccgtaaagtgatttgaacgcctgttggtacatgtgacggatttctttgagatcagtgtaaaatactggcgaaaggattagtttcgcttttgacattgctgttgccttcttttgggatttgcatagcatttatgaggtgagtcttcactgaaggtttttgatctgacatctacctgagactgccgcgtcgatctttgtcaatacccgagtgttcttgaactgattgatctgacatctacctgagaccaagcggtgggcaaactcacttcgtcatcagttcttgaactgattgatctgacatctacctgagaccaacggccagcgacagcgcaacgcgtcaacgttcttgaactgattgatctgacatctacctgagactggcgcaacggaacaaggggcaaaatattggttcttgaactgattgatctgacatctacctgagactgcgcgtcgttttgattttgaagatgccgcgttcttgaactgattgatctgacatctacctgagacaacggtaagccacacaagcgactaacacgcgttcttgaactgattgatctgacatctacctgagacctcggcgccgttgatggtcaatgtcagcgagttcttgaactgattgatctgacatctacctgagacaacgtgcaaaggtttcgccaactgcgtcatgttcttgaactgattgatctgacatctacctgagacggcagcaattgccggctgttgttgatgttggttcttgaactgattgatctgacatctacctgagacgtaaatcgtgccggtatttacttggctattgttcttgaactgattgatctgacatctacctgagacattaccacgcgttccgatggtaaaacattcgttcttgaactgattgatctgacatctacctgagacacatacatttcttttacgtcatcgtgttcagttcttgaactgattgatctgacatctacctgagacaacggcactcgtgatgatggtatgcactacgttcttgaactgattgatctgacatctacttgagacggcgacactggagcgctttcggttgctattgttcttgaactgattgatctgacatctacctgagaccgtggcatcggtcacggctttaaaattgccgttcttgaactgattgatctgacatctacctgagactatttgggaaaatacaagcccatcataaaagttcttgaactgattgatctgacatctacctgagactgcaacgcgcgcacgtggatttgcacgactgttcttgaactgattgatctgacatctacctgagacagaccaaccggagagcgttaagcgtcattagttcttgaactgattgatctgacatctacctgagacaatggcgggataagggtattcaaaccatttgttcttgaactgattgatctgacatctacctgagacagcttcaattgactattgcgggcttccagagttcttgaactgattgatctgacatctacctgagaccgaaagtcgtgtatatgtagccggcaccctgagttcttgaactgattgatctgacatctacctgagactgaaatgagtggtcaacttaaagaactttcgttcttgaactgattgatctgacatctacctgagaccacgtgggagtcagctaagcagtacaccttgttcttgaactgattgatctgacatctacctgagaccgtaatcggttcgttttgcaaccaaaacgggttcttgaactgattgatctgacatctacctgagacaagtagctaatcggatggaatagcgtgccggttcttgaactgattgatctgacatctacctgagaccaggaatgtacatccgcgcctcaatcaactgttcttgaactgattgatctgacatctacctgagacacgttgttacgattcgcatacgatgtttatgttcttgaactgattgatctgacatctacctgagacttaagactgatgttgacggagtctgttgtcgttcttgaactgattgatctgacatctacctgagactgacttcttatcgcgacatctcgcaaatcagttcttgaactgattgatctgacatctacctgagacaaataaatcagtcgccgcctgcatattaaagttcttgaactgattgatctgacatctacctgagacgccattctgtgtatagcgtgttagatagttgttcttgaactgattgatctgacatctacctgagacacccttatggttgtatttggctaccttactgttcttgaactgattgatctgacatctacctgagacgataacaccattgctcccaccggcacattagttcttgaactgattgatctgacatctacctgagactgctcggtgacacgttttagctgcgaattagttcttgaactgattgatctgacatctacctgagacttctggaaggattgtcccaacgctgaatgcgttcttgaactgattgatctgacatctacctgagactaacagtgtacagggcgcaaccttgtcttcagttcttgaactgattgatctgacatctacctgagacgcttcgctttgatcgcaggagttagtcgcagttcttgaactgattgatctgacatctacctgagaccggtgttttcacacagcctcttaatcaatcagttctcggctatccataaaatctctgtcaatatagatatactggcacttctcaaaaaactttctgcgttcgacatctgaaaattcaatgagaagtaattccaacgatgtgttcttaacctgatctaacagcttgctcagactttcaacatctaaataatgactgatgttggcaaaaatgacaagacgtttctcctcaagtttcgccaaagtctgaattgccgcttcaactttcgagaaaggctccgtgagtacttcctcatcaaaatgaacattacagtatttcatgatttgttcaagttttccaccaggttcgactgtgactggaagttcacttaacaacggctctctcaataagctcattgccagtcgttgtgactgctcaatcaactcaatcagccgctgatcctctatcaattggcttacctttttgatgatcaagcgttgaaataacttgtccaaatccagctctaaaaccgggtcaccaatccataatgatgccttgcgcagctcttgaatttgcatttgctcgttgctcaagacaatgccgtcatcgtcattgcgaaaagcctgaaccagatcaagcaaaactttgggtaaccctgtgtctattactgttatgacggagggcttcgtagtgatcagctgaaagggataatacgccaagttcaaatcatcaccgtcctatcagccgagttgcgaatatcctgcttttctgtcccgaccataaaatgcatggactgatactgtgcctctgtgaccatcagtgtttgaacggtaccagtcggcggcttaaccgttgctattcgctgctccatataagcagctgactttttagttttgcaaactcgcacataaaccgagtattgaatcatcaaaaagccttcatcaatgagtgctcgccgaaaccttcgataatttcgacgatcttttgaagttgcaaccggtaaatcaaacatgatcattaatcgcatggctcgatacctcatctggaaacttcacctcaattcgacacaccttagctttgccatctaaaaaggccagacaattttcaacatgatcagccactgcattttggagtaaggctttcttaccgttgaacgtaatctctaggtttaacaaatcaatcaggccatatttgacatctagcgtcagctctttaatccgatgctgtgccacccaataatcgactgcgggacgaaaaggctccattaaatccgagccgagattatagggatttgaagcactgtgatgatgcaacccaacctctgtcagatgccctgtgcttacaattgctcgattagtggtcgaaagtagcactgaatacccgtaattcaatgccgcattagttgcacagatgtcggagcgagaaaaatcattaccaaacatcaacttaaaatagcgacgtgcggcactagcctctcgattagacacatcatttatttcaagtgcatctagatcatccaatagtccttgagcatcatgtccacaaagcttagccacttgcgcctggttactgattttggccgcgacaatttttgtccacacggtttcgattaaatcgagtggccaattaacttgtaatcggacctgttcagctcgccgtcgatcagaatacaagttcttagtttcagttactggttgcccatcccgcccagagaaaataacttttgcgtttgcgtccgctaacgccgcaatcgcatcagccgaaatcaacgcacgtgtcgttgtaaaaataacttgatttagatcatctattggcatcgtatacacgtcaccattagtttgaacaacaagcgaatgctgctttgttgtcactttacaatgctgcgtgatgatgaacgatcgccatcccataaaatcaccccttgtaatcgcttccctaatatgctttaatacagttgttgagacgacatcctcaacaacttgaattgattgatctgacatctacaagttgagatcaaacaaagcttcggctgagtttcaatttctgagcccatgttgggccatacatatgccacccgagtgcaagtcgggtggcttttttgttatagttcgcttaatcgaacaattctgttaagcattcctgttggagattgataaatcaatgtggtgtcgtcatccagcacaataccacttggaacttgcaaaaaaccaaaaggtgtttttatgcccaagttcttcaagtcaccattctttgcaccagttcctgctccagttagaatattctgaatggtttctctcttccctgaggttgtaccatttccttccaatggtaattttgaaaatatatctttgctttgatcaagcttttttcggaattgattaatatcatacagaggaaaatacttattaatctgttccactatattttcaaacagcctgccgacttggccattttccacagttttcgcagactttacaagttttgacaaaatttgctgatcggagcgtgacatccacagttcctgatagttatgcatcagcgtatcggaattaaccatgaaaaagccataacgtttattatgaaagagttgttcgcgtggtactcgtggaataccgatatcaaatggcgttattgcttttttaccgttcttcccgatttttgtgaattttgttgtcaaaaacttctttaataattctcgttctttgacagtcgattgcgctctagcttctttcaatgccgctacttgagaagttgcaattctgacaactctatagacatctgctttcttttcaacagttttaaccaccgccaaataagccgtattttcccgtgtataacccccataaacctgagtcggataaccctgcttcttaggaatcagctgcttacttccgccacgttctttcgaatccttggcagcataaattgtctgcttgaacaaatcagctgtttcaaagtaaacctcgtgcgttatcaacatcctcttgaagttatatatccgatccaactcttggatatcacgttctttatcccaaacaatctcgccggtatctttagcgacaatattcttcttagcatgtgttagtgcaccaatgaagttgaattcgcggaacttcttaacatcgacctttgcaaattcgccatacgtgaaaaatggcgccaatttcggataccgcttaagcagatacgtgccgatccgcgctgctaagaaggcatcaaatgcgtggtggtagtggttcacatcacgattctttggaaagtctagttcttcgcgcagttgatgtgataagccagctttgaccgcgatgatcttggtgttgggatattgcgccgcggcaatctgttcggttaatttaatgatctgacgtgtctcaaccaattgacgcgcgacaaatccgtgcgcaaacttatcgatctcatcaggacgcagcatcaagtttctgagtttacgcccactgattagaccggcttcgtgccacttacgccaagttgctgccatcttgcttgcaaacaaagttgaagcaaatacattgttcttttcgcggttaatggtggcgttaacgagcacacggttatctaaagagtcatccttgatcaacgattgtggcagtatgtgatcgatgtcataatggctgagttgatcgatattcagcggtgcgccggtataaatatcccgcccgccttgcatgaagtaaagaactagccgatcggtaaagctggccttgtcagcaattttatcctccaattcaccacgaacagcactatcaatcagctcttgggcagcattagcgtaaactgtttgaatttgcttttgccgtgactgggtgcgtttaccggcagtgcctggtccgtctgccgtttcaatataaagccaacttggatcttgaccgtttgctgcatgcttgatgtcttcaacaacccgtaacacttgacgcaaagcttttttattgcttggcgaagtatatgcatcattaatgacatcttcaatgtcgtctgccttcagtttgtcttgatttaattccgccatcgttgttttcaacgtttcatcggtcaaaatttgcattaagttatgattcgaaagcattaattcctgaattacggtgtggccattgcctagtttcaacccatctaaaagcttgcgcgagaactgaccccagccacgataacggatgttgcttaatgccttgattgtatctgaatccaaccaactaattttagccagctcggtcttgaaaattgcggcatcttcaaaaactgtcgaccacgtaataatattttcgatatcatgctctttggtcggatcatcaattgcctcatgtaagatctttttcaattgatgataggttgaaagcgaacttaagaagcgtttctcatctgccagcccacgaatctctgggcgtttggcaaaatctccatgagcaactagattttcggcgacttgtttaatggtcacgctgctatgtcgctcgaacacttcgcggatcaagcgttgtttttgatctgcgccaagcctcctaccatcaatgctgacgttgtttaactcattcaaaacttcatacttttgatataacaggcttcgtttaggtaagacatcttcgccaatcaaataagtatcggtgtttttcatgcgttggataaacatgtttgccgaagctggacagtcgactttttcatcaaaattgtaaggggtaatattgcctgaaggatctttacggatcatccatgcaaagacattttctcttgactcggcctgttcttttggcgtgatcagtggtcctacatagtaagggattcggaaagttaacagttcatctagctgataaggtttgctagcgcgatgcttctctaccggattcggtttggcaagccagtcgtagtatttggattgattagcaataatctggtctagttcacgttgttgcagttggacaggaatcgcaccattggccttagttcgttgtttgagcatgaagtttgcctgtcccattcgattcaacagctgctccgacacttcatttgggtgtgcggttacttctttggttaaggctttaacaaagtcttccctcaaaaaaggcttagcatcatcgccattaatatatcgatcataaagacctcgaattgttttagctaattcgtgatcatttagtttcttgaggtaggttttaaacagctcaagatcttctttatgttgcccatagtcagcaacttttgcctgggataagctcatccccgctggcacaatgccatttagcaatcgtgctcgataatgttcttgaatttgttcaaatatttccgttccttgatcggtcatggaagtttcgatgttactccacttgtcgtccagctgccccatcgagaattgccaatttgacgcatcagcttcatctacttctgtacctaaagcaagattgaacttggtttttagccctgtgatcgctttggcaaactctgtcagcacttgtttgcgtttcttgacgatttctttctcaccatcactgcttaataacaagttcaccaaggccttctgggtatcgctcggcgtcgcttgttcatctagcaattttgccttgaagtcatcagcctttgccaaatcaaaagttaactcaagatcaggctttgctgaccatcacgcaaaactgtttccatgaattggactttttgtttagccatgtgtggtccaaccctcctttatgattgcttcaactgccgcttgaacttcaggcaatccgtgtcgacgtgagcgcgcgcaggctttggcgtctccgccacaaaccaagcaggctcgcggaggtaacttaaaatcggtgcgcgaaacctgatgcagttcttcaccttgcaacgtgaccacatccaagtccagtaagtcacaaaagcgttgttgctgctcaaatccgatcttgcgtattcttcaaatcttgcagattatctttgacttgctgaattttctgatcgatttctttattgttgtcttgtgttggtgtggtagaagtttgcgctggtactgtagcaatattaacacctgataattgcctgtcagtgccatttgagttcaaaatccaggctttctgaacattattatattgtaatgaaaaaccagcgaacttgtcatcactcagaagaatattacgatgaccctgatagctatcttcatcactgttgaataacccttctatgctttgagccatagcttccataagttccatcatagagggattattctcatccttggcaaaagttgttaagtcaatgctagataaagtttcatcaacatcataaccaaaggaatctaaaatcttttgttcatcatgactagtcgaagagatatttgttaacgtttggccacgtttttgaacagagttaagaaagtcctgtgttgtctgaatcgaacttaatcccattgacttacggtaattgttgacaagcatcattgcatactgatttaactcatctttttgatcgctgcttaattgattattatgaactacatcacctagagaccattttggttgatcattatcaagacgattatacaaggcatccattaaaccggattgagtggggtctttaaatacaggcagattttgtactagataattgccattccaagtcttacctgcatccttatgtgtcacaacatttgtccatagcccatgctcagcaacgtaatcaaatgtacccccgtcactcacttgttccgttggctcgccggatgtccgttgactattcaggtttgcaatctgtgtattggcggattgactcgcagccgcataactagaatcctgctgttgtttcattgcggttaaactacttgtggcactcgaactagctgcggctaaagaagcttggtcacgctgagtttgcgcctcggattgagcagccaaactgctggcataagaggcagttgcttcacttgctttctgagttgctgccgcttcgctttgagctgcagatgattttgcttggtcatattttgctttttgtgcctgcccattcggcttcggtcatgcctgatggtgttggtgtactggcaacagatgagttggcgtcctgataggttgccactgattgttgtggagcagcagcctgactgactgcagaaatctgaattagaggaaaagattgcccgctacgaccagaccatcgagacgtttgcgaacagtgaacgttacaccaagcccattcacgcgttgacaagtatgaagggatttaaaaccacaacagccatgaccatccacatcgagattgcggacttcaaacgtttcaaaacagctaaagcgtttatgtcttacgttgggctaaatccgtcagaacattcaagcggcgatcataccatcaaaggggggatttcgaagcaaggtaacagtatcgtccgcacaaccatcattgaagccacacagggattggtcaagggcagcattgggtacaaatcaagagccctaaaagcacgccaagcaggacaagaatcagccgttattagctatgccgataaggcaggcgctcatcttcatcgcaaattcacgcggatgcttactcaaggaaaatcatataacgtggcaatcgccgcagtcgcccgagaactcgctggatttatctggggtatggaaactggcaatatcaactactgatcaccaaagcgcaattgagcccgaagattcaaacaacaaagatgacagcaagaagtatcaaggactaaagcgtcacgatattgtcgctggtagcaacaagcgtcagaattcaacggtctggctatttacgagcgttctattttggcacaggctcgccctgggtatggccatatctagagacaaagagtttgtgatccacgactatagattagattctaaagccttcgacgggaccattaacctggggtagccaatccccgtataacagagtggttaaatgtcgagagacaacggaattctggagcttgttagtgccaacgacaatatcgaaaatcttataaagatggggttgacaggggtcacttcataacagaacgcacaagtaaacaaacaaagcccccaaaatagaacgcattccagtctccacccacaatgtcacaacaccaaaaaaccgcagccatttcaaaaacggctgcggttaaacatatcactaagtttcacccaccgacgctgataaagtaaacttcaagcggccggctctgtatcaagcttctttgatttcgaacgcatcgtcaacgcttcccagtcaaccaatggcaattgcgccaccgcacccagaatcaaaatcattgaccaggtgagaatcagactcatggtcacatcaccggtgaaatgcgcgagaatccggacccgcgtataagccatcaaagcgccgtaagcgaaagtgagccagaagactaaccgttgacgcttcggctggtcacgatcaacgaaccaagtcaacgtgaggatggtcgccgcggtttgggtatggccggacggaaaactcatgtgaccgttagcaccatttggctggaaccagctggtgaagtgtgccggattaccatttaattcgtaagggcggaaacgaccccagaaggttttcatgacgttcacaatttggtcggacatgatgcaaaccaaagtggcaactaccgccacttttaataagtaatggagctgttcatcgcttttacgtgaaagccagtattgactgccagcaaacacagcaacgtagagcactaggaacaagatgacgcttagcccacccggaagagccagcttgctgccatcggaattggccattcccattggcttgccggcgttgatgtcgttgattgaagtgatcaccatcgtcatcgcgtatttcagataaccagcccacagttcccagccggcatagatgacactaccgatcaccatcaagccgcgaatgtaccatgcgagttgcgatgatcgcagcgcatagtgacaaacaacattacaactcaacataataatcagtggcgcagtccagaggccaacgtcttgaaaaagggtggcaaacggatcgttcatgttaccgatcgtttgagaaatctgccaatcaaagccagcagctgcagccaacaataaaagtaagataccagcaacaatcagaaaaatatgtttgcggatcggagcgtttaatttttgcgtttggtccatatcttttccctcccatgtactttgaaaatagcacatagtttacagaaaatggccggatttacggtacctgtacgtaacatttaagctgccgatacgaaatttacagagggttgctaaagtaaggctcgtcaacggttagctggcggcgatcaaagttgatggttgcctgtaaaccatatggtaaaacggtgcggggataagcgtggccaaagtttaagttgtagagaatgggcgtttgataaggttgcgtgacatccaagagcacctgctgataatctgcaaaataggtttcgttntgaggcttacccactaagatggccttcacttgttgcaagacaccgtgatcagccagatgctccaagtactcacgataggtggcaggtgaaattttatcttctgaagtctcgatgaagagaatcttatcagtccaatcttgcgggaaaagatgatactttttagcaacttgcggctcatcgtcgtaacgcaccgggtagagcaagtcgtgaaggctatccaaacagccgcctagcaatgttccggtaacctgaccatgcccacgcagcgctaaatagccatgctgctccggatgcgctttccgcggcacccctaactgatccgcggaaaagtcagtccgctcttcgtaccaggtaggactggaagtgatggcagtcgttgccggattttcgaaaaagtgttggaagctggcagcagtatatggcaataagtgcgtatccagctcagccaagtcgttcaagaagttcggtccgtaaaaagtggtcatgcctagctgataaaacatgagatggttaatggtggtgtcggaaaagccagtaaaaattttaggctgggtttgaacagtcttaataaatgccggatcgtcaagtaggtaaggaacaatgcggtaagtatcatcgccaccgatggcacaaatgatgcccttaatgtcgggatcggtcatcgctgtttttaagtccgcggctctggcttccggatgtacgtttaaataatcacgtccgcgtaaagcatttggcataaaccgaggtgtcagccccatatcctccaaacgcttaatgccaagttttcgttgatgggcagcaaacgcctcaccaagtgtgccggcactgaggctaacaatagcaacttgatcatgcggttttaaagtctgtggttttttcaagggtatccctactttctagtgtgaaaaattaattttcgtggatagctttctttttagtgtatcgtttaaactaacctttgtcttgtatcattttttgaaagtctgcctcgcttttgattgatgccgacattcaaactgtgaaccagttgcttgtcttctaagccggcaagctggtacgatcgaatagaggattgaatgaactgactttaaaaagtaaaatgaccatttttgccaggatttaatggaggattgagccatgtacaccattcaaactgctgcaaccattgccggccgcggtactgtaattacgattgctccgccgattgagcgcattcaagccggtgatcccgttcggctgaatggcgcaacagtcggcaaggtgtgtgcgctggaaaaggcccgccatccgcatcatagtaacaatcagccgtgcctgagcctactgattacggaaccggtggaggtcggcgataccattgagttccctaagtcacaatgttggcattaggcatcatatttcttttatgtgggtaacggatcttcgtgccatcaccgccctgaccacacacctacatagaaaaagcgttgcaattgtcagatgagagctgacagtcgcaacgcttttcgtttacttgttctagtgattggctgtggtcataatgccggcttcagtcatgccttctgcgtaaagtttcagtttaccgttgataatgtccataacgagatcgccatattctacgccatctgcttcggctttctgtggtaggagcgaaagtggtgtcatgccgggcaggttgttggcttcgatcacccagacaccccttattgttggcaaagaagtcaatccgcccgtagttttgcaatcccaaaacgtccatggtttgtaacgagacatccttcattgcttgatgaaccgattcatccagattcttaggtggcgtgatgaagtcggtgtagcctgcttggaatttgtgcttgaagtcgtaccaaccggaatgcactttaatctcaatggcagaaaacgcccggccattgacaacgcctaaagaaaattcgcggccaggggtgaattcttcaacaatcgcactgttatcgaaccggaaaacatctgcaatgccattttccaattcttcttgattgtgtgcaatgtgcgtaccaacgctagagccgcctgatgtaggcttaacgacaaccggaaagtcaaacggtaccgtatgcttaccattttgattgcgcttgaattctttgaacgccgctgtctggatgccgtggtataacataacttctttactgaagactttattcatggtaatgccggaagccagcggaccggaaccggtatatttgacgttgttcagatctaatgttgcctgaaccttaccattttcgccatcaccaccatgcagtgccaagaacacaatatctgcagccttgcagatcgccaaaacgttaggaccaaacagttgcgtgctgccgtctatccgtaacttgttgatgtcggcgtcagtcagaatcgcatctgaaattttca

SEQ ID NO: 40 - DNA, 9762 bp, LACTOBACILLUS RHAMNOSUS
gcgagctgacttagtggcgcagttgttgacttatcaggtgtatcaggaagcggcaaaggatttaaagcaacgtgaagccaagcgtgcccgggcttttgccaagccaacaactttgccggatgaaaagatggcggtcccgcttgctccaggaacggtcaaactaattgatctttactacatgcacggtctaactcaacaagaaatatctaacattgcccatattcacagaaccgaaataagtcgaattctgaaggcggctagggatgaaggcgtggtatctatcgcaatcaatcccgaaaccaccgccgtcagccaacttattgatttttttaaacaaaaatacaatttgcgagaggccgttatagtcccggcttctgaaaatggaggcaatgagttaaacgctttgagtgtttacgcatcaatgtttttatcaagaatcattaaaagtggtgacgtaattgggttaagttggggttcaacgctttcaagtgttatcagtcaatttccaacagataaaggccttcgtgatattaaagttgttccgctggtgggtggcccaatgggaagaataccttcgaactatcatgtgagctatctgacacaccggctcgccaatcggctaaacggaacagcgtttgtcttggattcccctgcctttgtcagatcaaaagcgcttcgtaaagagcttctcgccaaccccaacacgcaagaaatcttaggattgtggaatcgggtcaatatcgcgatctttggcatcggaagttcactaattacagattctcctgattggcaagcgttctatgagaacacaaacttcaagtcttatttcagtgccgatatggtcggagatattctttcacaccctttcgacaaggatggaaaattagctcgcgatatcgactccattcttgttgcctttcctttttcggcattgcgaaaagtaccacactccgttggaattgcttttggggaagaaaaggtaaatgctatccttgccgctcttcgaggtggtctcttaacactttaattactaccgaagcaacagcaaaggcaatcaaagagttgtcctaacagtttcacatatgtgattttttggtagcgcttacttgttcaaacgaaattgctggattaacatctgtttgtagccagaaaaaataagcacccaatcaattctcacatttgtgaatggaggatatcaacatggaaagtacagcattacgaatttatggtaagaaggatctccgaattgacacttttgaccttcccgaaatgaaggacgatgagatcctcgcgactgtcgtgagcgatacaatgtgtatgtcatcatggaagcttgcgatggaaggtgaagatcacaaaaagacccctgatgatttagcgcataatccagcagttctaggccacgagttttctggaaaaatcttaaaagtgggcaaaaagtggcagtcaaagttccacgctggccaaaattacgtaatccagccaaatttggctcgtcaaaacacgccttttgtaccaggttattcatatccatatatcggcggtgatgcaacaaagattattattcctgatgaagtgatgacaatggggtgcttaattccattcgaaggcgatgcatattatgaaggttcgttgtgtgaaccggtaagttgtgttattgccgcatttcgagcacaataccatgtcaacttccactcataccaaccaacaacaggtatcaaagaaggtggcaacatgttaatcatgggcgggacaggcccaatgggactacttgccattgactacgcactacatggtccaaaaaagccgtcgacgcttgttgtaaccgatgtcaatcaggccaaactggatcgtgctaaaaaactttatccatctgactgggtagatatcaagtttgtcaacgtcaacaacttatcacttgatgagcaaaaagaagttcttctagatgcagttgatggcaatgggtacgatgacgcttttttgatgatcagcgttgcaccgttagcaactttagcagactccctgctcaatcctgatgggtgcttaaatcagtttgcaggcccgatgaaaaaagacttttctgcgtctgtaaatttctacaacatccactataattttactcattttgttggcacatcaggtggtgacgcagacaatgaagcagaagcagctaagctaattgccgagaaaaagctggacgtttccaaagttattacccatgttatgggcttaaacgatgcagctgagacaacaatgaatcaacctgaaattggcggtggcaaaaagttggtgtacagtggtaaaaaatttgaccgaatagaattagccaaagtagaccccacgaccgacctaggaaagattctggccaagcatgacggcttgtggtcaaaagaagcagaggattggattctgacaaacgaacccgactatgatgcgtagaaaacaccatcactatctaaatttttcagcgttaaaaatttcttaaatactttaagcttaaggactagcttatagcatcaaatattcaaagtagcggatacatcgaagaaatgtatttgctacttttttaattcatttaaattgtgcagtatttatagttataagaaattcacaactgtcacaagaatcaatataaaaaagtccggtatagtccttatactatgaccgaaccttttatcatatcgataattctctctatattcagcttcgcaccttgcataattctcagataatacctgctgccatctgttgcttcatttgctgttcgctcaaattctttttggtaaagcccaagataagcgctgttataattgttccgattagaatgcagccaatataaagaagtggcttattgcaggcaattgggataacaaagattccgccgtggggtgcttgcaacgtaatgcttgacgccatgcagattgcgccaccaactgcaccaccaataatatttgccggaatcaccctcagcggatcagctgctgcaaacgggattgccccttctgtaatgaagcttgcccctaatacccaattagctttacccgcctcgcgctcttggattgtaaactttcgcttaaacaaaacagttgcgagtgcaattccgagcggaggcaccatgccaccgaccatcaaggctgctgaaggcccatagatttttgaagcgaacatagcaagtccaaaagctgaagcggtcttattgataggaccacccatatcagatgccatcattccagctagaagtgctcccatcaagaaagcgttgacgcccgtcatggattttagccaatttgtcaggaaccttatcatatttgacattggtgtattcagaaggaaaaacataacgagccccacaataaaggttgctatgagcgggataactaatactgccataatccctttatatgagtgaggaacattctgtgtctttttgacaatgaatcgagtaacatatccggccaggaaaccagcgaccatgccccctaagaagcctgatccaccattaacagccatcatgccgccgatcataccaggcgctaaacctgctttatccgcaatactccatgaaatgaagccgccaagaatcggaacataaagtttaaaagccgcattaccaccgatttcattgaaaaatgctgcccagatattatactgatcgctcttaggatctgatgcgtagataccaaacatgaaggaaattgcgataaaaataccaccaacgacaacaaatggaatcatatacgacacaccactcatgatgtgcgtgtagaaagcacgagcaaatttaccgctaccagtcaactcttcttcagacttagtttctttccctaaggcggattcaaggttcttatgcgttggagtagattttgaacttgtcgtatctttttctaaagcttgatcaaccactgagccgggctgatcaatagctcgttttacgggaacatctaagaaaggcttcccaccaaaaaccgtggtgtcaacttttacgtcatgagccacaacaattgcatcggcttcttcaatgtcctttgaagttagtctattctcaacaccagtcgaaccattagtttgaatcttggcgcgcatccccctttttttggcttcattagcaagtgcctcggctgccatatacgtatgtgcgattccagtcatgcaggcgctaatcccaataagatatttcccagcagattctcgcgcatttgaaatgttggcttcagtatctttcttagcatcctcttggacaagaatctggtatatttcattagggtcagctgcagttatcaatctagctcgaaagctttcatccattaaaaaagttgaaatctttgacaacatcttcaagtgttcatccgaagcgctctcctcagctgcaatcataaacactaaattaactttttcctggccccattgaacacctgcaagatctctaaagacagcaattgttgatctttcgactgctctggttcgggcatggggaattgcaacgccatatccaactgcagttgaaatttcattttcacgttgataaatagcttttctgaatacgtctgcatcttggacataaccattctggcttagtttactgatcatccggtcaatgacttgatcttttgtcatcggttcaatgctagtgtcaatatttttgatatcaattagttcatcaatacgcatcttgttcacctccacaattggaaatctcgatggttatctctagtacaattcagctttaccagtagaattaaagagatccattttgtattcgactacctcttgagccgcctttctggctgatggcatcagctgatcgggttcataagcaccaggattttcatccaaattcttgcgtaattgcgaaaagaatgcagttttcatgtccgttgacaggttgatcttagccacaccatgaagatacgtcttcttaatctcctcatctttattatcagagcctccgtgtaagactaatggaatgtcaactgcctcatgaatcttctcaagcaaatcaattcgcagttcaggtttttcaacatgactgtaatgcccgtgccgcgtaccaatagctacagcaagcgtgtcaacgccagtcaaactcacaaatttctttgcatcctctggatcggtgtagagaatcttgttgaccccggtcccttctgtcgaaagttcgttagacccgattgtccctagctccgcttcgacagaaacacctacactatgggccacatctacaacttgtttagtgagtgctacattgtcatcccaagactttgccgatgcatcaatcatgactgacgtatacccgttatgaatgccgcgtacgcaatctcccaacgttgcaccatggtccacatgaatggccattggtacacgagttcgatcaactgcttgtctaacatacgcagtgaaattgtcacctaccaaattgatttcgttggggtgaatctgaataatagctggcgcatttttagcttccgccgcgtgaataatcgcttctacgaattcactattggcgacattataagatccaacagcaaaattatttttatatgcaacacttagtaaatcaaccatgttataaagcattcgaataatctccttttctattccaaacctcgatgaactctcgctttgtcttagtctctaataaggcatgaacttcagccaagttattggtgtgttcataaacatcattaaaaaagtttttgtttgttttaagatcagccgcgggaatgtatatcacaaccaatctaaccttttggcgtccccaagaaattgctgtcttattaattcctacgatgactttggcagctgtctccgaaccctttaaaaaggggtgaggcatagctacaagatgtccaatatcagtagatgacattgattccctctttttaaaatacgggaaaaggttaaagtacccagattttttcaataaatatgctatcgcatccatactcgaagactcattcatatgatgatagtcaagcttctgaatcagagacatcgtaccaactgtctcaataaaattttgaattctggctatatcattagtgttcaatgctttgctaatttctattatcttatcgtttgcttggtcatccgactcttgaaacccgcatcttatgatcaattgatacttcgatatatcagctaaatccattgccgttgtgactaccccaatatctatccttggaaaatatgtctggatcttatatcgaaacaattctccttctgccttcttgccttggaaaactaattctgtccgaattgtgctcttggtctcctcagttaagacaagttgaatatgaattgcgagataggctatctccgattcaggtgcttgtatatcaaaatcgttttgcagctcatcgtaaagaaaacaagcaatcgaataggcaaacagatattctctctttgttttttgagaatatggattaaataccggtatactttcctcgattggatctagaagtctcataatatgatttatgatttggttccgataactttcattagaatatagcggaatgccgtaatagctttctgctcttttcagtgaactttccaattgaccacgctgtagcacattcatatttggcacgaacgaacctggggtatttaatggcatggcaatcagatagttggtaagcgccattatttcagctttgttacttattgctgttggggctcttgctaataaagaagaagccaattgaaattcaggatggtccttgttgctatctttaacttctgaactattgatcggatgattttctctgtaacggcttatcgcaatgaccatgtgacagataatcttcgcgtatacaatgaaatccattgttgtatggtgctgagagaaaaccgtgtctatactaacaatttctttctcaatcgtttgcttatcacacaccccatttaacaatttaaaagtagaatcggttaaatctcccttaacaatttttccaattggtattagttgttctaaaagcaatcgtttttgattttctgcccctaaaatccgaatacctgtaaagattcgcgactccaacgcaacgttaaggttcatatcatgaattttggagaacagcacctgaaccttactgcgaatactttcgacagaataatttaattgcattgcaaggtcatcgaacgtaatgaaagaaacatggctcactagaataaaaccaattttaaagagcaattctgcatcatcctcagcgaataaccgatttttctatactttcgttatacaagtctctttgtatccggtaccccttgttagaggaaataatcagaggcccttgtgtttcactactgtttaaagttctcacatagttccgaatactcctctctgtaacccccaacatttcagatagttgcaaggcagtaaggtaatctttttgctgtaataagatgtcaagcaactgtttaatcttctcgttcataattgcctcctcttctacaggtcaatcccaattgccctcctgacaattccagtatgacacgttagttagcgcttacattagtatatatttttccggtcccggaagtagagtttttttaaggtcagtatcatacaatacagcctacgcatgtctacttaactaagcactgaggactgaaaaaggagtcaaggtggcattcccctcggctccttttaagcacttcgttaatctgataaaccaacgtattcaactattccactttaaaacaacgatcctattttgacacaaacccatccgatccaggtggttgcagatccaacaatattggacatactggttattcccttacccatcggaatctttgaggaaattgcagattgagtatattcgggtgcaatgctggttccaacgtaaaggatacaaattaaaattaatgtccccgcgattaccatccggaacatgttccgtttaacaaatggggttaccagtgccagcaagaacattaacgatgctagatccacaaacggtaacattttattgcccggcaaaataaaggccaagataattgcgatcggaatgagaatcaaacctgttgcaagtacagatggctcaccgataagcaacgcagtatccattccaatatagaaggaccgtttgggaaaccacttttttagctgtttttcaacatgatcacgaaccatggtcaaaccctcaactaagatgtcaatcatctttggtaatagaaccatagcggctgcaacattaatagccaaagtcagggtcttagagatatcataccccgccattagcgctatcgctatcccaagaataaagcctaaagttaatggctcaccaaagaccccaaaacgcttctggatcttctcaggttgcatgtctatcttcttgagaccggggatgcgttcaatcacccagttggttgctatgccaaatggtacccaagcaaggcatgttaggtgaggaaatgaaattccttttaaatttaatgacttatactgtcgctctatccacggtgctgtcaaatctgcgactatcagtgtcagagcaaagataatccatgttgtcaatgccgcgacccaaaagctatgcgaagcggcatatacaacggcagcaagcagaagaaagatccagtagttaaagatatcaatatcaaccgtcttggtcagatttaatactagcattaccgcattaattaccaggaacccaataacgataatcggcataattggtgttccccatccgatagttgaagcagtcggccaacctgtatcgacaacggtaagatgcaatcccatccgcgcaaccattgcttttgaagcaggtccaagattggttagtaaaagattaattaccatactaactcctgtgaatccaataccgaccaacatgccggccttaaatgactttcctatagagagcctgaacactaccccaacaacgaagaagataatcggcatcataactgcggcacccaaattaacgattgcctgaattatttgcattatgcttcacccagcccttctttagtgacaagctactcttgcaatgacgccataaatctctcagcaaagagtttaggcgtattacgaaaagcgtcagcagtacttcctgctaaatgtgaagtcaaagtaatattctttagcttcaaaaaacggctgtctggaggcaatggctcgttgttgaatgtatcaactgcagcaccgcttatctttccctgctcaagagcggtcagcagggcatcttcatctaccaactcagcgcgggctgtattaataaagtaagcggtaggttttaactcggcgatgcgctttgcattaataatgtgatctgtttcaggagtaaccccgcatgtgaattgttaacacatctgaccgcttaatcaattcatctaaaggatcaatttttgtaaatcctttctgttcatcaacataattgtcgtaaaagatgacatttgcgtcaaagcctttcaagaactgcccaaccaactggccatgtgcccaaaaccagcaataccgatagttttacctcccaattcaggaatgtaatctttattaggaaagtcttttaaccaaatatctttttccattgcggcgtgagttcgcgcaatgttacgtgtctccgcaagaatcatgcctaccgtaaattcggctacagcacgtgcattgcggccagccgtgttcataactttaatgcctttcgatttagcatattccgcatcaacattctcaataccaccacgtaaaactccgatatatttgaggttctttgcacgatcgataatctttttaccgattggcataaattgtgtaat

SEQ ID NO: 41 - DNA, 12023 bp, LACTOBACILLUS RHAMNOSUS
gcgatttttgtttaatttggctggattattgaattgctgaatcgcattaatcgttaaaatctgcaggtcgtatttttgctttaacgtctgaaattctgcaacctgcatgccatcaatgacagtctctgagccatcagaagtggtcatatcattgcgtaactcgacttgatgaatgccagcagcttcggctaattgaaaaaagttttccagtggccgcttctgagcaatttttcgattcaaagccatttgtgtcagttctatccccatcacgactcccccacttctcttcgcctacccaaacaatctgcgacttagtgtgatcgcaattatggcgtcaactaaagcagttgcccgccaccgatacagacgcctcggtgcagcaacctgcacatatacgaactttgagcaccatgaccaaacgcctctatgctcccgtttctgaccacaccgactcgcgttcacaaaaataccttggtcgattcctctggcaaagttccagaagcggccaaggcatcctgctttacttgatattctctttataaactgccatccaaaaattgggctttgccttgaccaaaactccagccttgatcatgattaaacgaaacattgaccatgagatcgttcttatccactaatcccgcttcggataagcgccttgccaaactttcataaaactgctctaattggtgaaccgtacgaacgcgactcactaacgaaatcacaaccacctgatccgttcgtggtatgcccaacccggtatcctcaaccaccatttcatatggctcatgttggtggacaatttgataacgatcacgctcgggtacctcaaacgctgcaaccatcacttcatgggtgatttgcaaaatagctttaatagtctcgggtgaccgcccttttaacatgtcaaatcgaactaatggcatcgttccccctcctcatacgcagcggtaactgacaatcagtattcttattagactatgaccgacatgagccaattcaatcgccatgtgaccggacaattattcaaaggtcactgagcgtttactctttccaagaatatgaaatgccttcattttggtttcaactaattgcgcaatcgcctttttgcctgccaaaagaatcggttgcggatcatgaccggaacgtttggcttgcaccgcttttgtgatagctgcagtccacaccgtgttcacttctgtattgatattgatcttagccgttccggtttggatcgcctgttgaatctgatcatcaggaatgccagatgcaccatgcaaaacgagtggtaacttggtagcggcggcaatagcagccatccgttcaaagttcagattcggacggcccacataatcgccatgaaccgatcccaatgctgcagctagggcatcgatcccggttgcggccattttaacggcatcggtgacactagcataacggatgccattgattaagccattttcattgccaccgacactgccgacttctgcttcaaccgaaacatgatgctggtgcgcataacgaactacttcgtcggttaaagccacgttttcttcaatgggcagcttagagccatcaaacataacagaggtatatcccgcatcaatagcctgataaacatgttcaactgacaagccgtggtccagatgcaatacgaccggtgcggtgatgtgcaatgcctgcaccataaagcgtacatagccggcaatgaaatcgaatccgccaagaaaatcaataattcgatcagaggtagcaacaataatcggcgttccggttttctgcgcaactttaagatacgtttccaaccaatcggcaccattaatattaaagtgaccgattgctgcgtgatctgccagtgcagcttgaatcagttttgttgccggtatcaacgccataaaaccatatcccttctcaaacagaacccttaaactgcttggggaatcgtcatgatcgtatctagataatgcttagcctttagcgcatattcaaatggatttgcttttgctggatcttgttcagcttcaaccacaatccagccgtcatagtgttgcttttgaatggcttcccaaatcggcttgaagtcaatcatgccatcgccaggcacggtaaacatgccatttttaacgccttgaaggaagcttaagtggtcagtacgttcttgctgggcttgttcaggacgaacatccttgaagtgaatatgcttaatccgatcatagtagcgatcaaaaattgttaatgggtcctcaccggataacaccaaatgtccggtatcaaacaaaagagacactttatccggatctgtcatggccattaatttatcaatttctgccgttgtttgaaccccggtacccatatgatgatggtaaacaatctgcatcccgacttcatgggcgcgatcccccaaccgttccaaaccagtggccaagcgttgccactcttcatcggtaaaatgcggtttatcatcaaagaccgacttatccaacatgccttgaacactatggccttgttctgctaccacgattaccttggcccccatggcgtgtagaaaatcacgatgcttgataaacgctgcttcggtttcttcatagggcttggtcgttaaaaaggcgctaaaccaggcactagcaattttcaggtgtcgcagatccaagtaatgctttaaaaccactggatctttaggatatttattcccgacttccgttccttgataccctgccagcgccatctcatcaatggcctgttcgaacgtcacttctttgcccaagtcgggcatgtcatcattcgtccagccaatcggggcaattcctaatgcaatcgtcactttaagcacctacctttttatcaacatcggtaaccttgacaatatcgttcttttcgtacgcgcgttgcagtgccagcgcggctttggtccctcgaaggccatcttccgccgtaatgccgactgtctcaccagtcaaaatactgtcgacaaaagcctgttcttcacttaagaatgcctgggcaaaacgctctgggaagttttgtgaggttggccgaatgatgccttcttcattcatgaccgtcaccagattcttctcaggcacttgcgcaacccgcagcatgcccttggttccgataatctccgtttcgacatgatagccatgagcagcgttgcgtccggctactaagatcgccatcgtcttatcctcaagttgcatcagtgcagcacctgtctcaagctcgcctgcctgatccaaaaccggataggcgcgatttaagccgatagcccagactttatcaatttccttaccggtcaaccagcgaataacgtcaatatcatgaatcgacatatccaggaacaagccaccgctattggctgaagttgcgaacttgacaaaactttccatcccggctgcagggtcaatactgtaactgcgaataagcgtgatatcaccaattttgcctgcatcaactaattgcttggcataaacatatgaatcatcaaagcgccgcataaatccaagttggaattttaactccgggtgatcggcaatcactgcctgagtgtgtttaatggcatccagatctaacccaatcggcttttcactgaaaacatgcttgcctgcttgcatggcactttctatttgcggcaaatgaaacccagacggtgacacgataaagacagcgtcaatatcggcatgttgaaccatgtcatcaaagtcttcataggtttcttcaactccgagttcttgacgtgcccaggctaactcctccggtaccacactcgttgccgcttgcaacttagcatgtggaatcttcgtggctagattggttgcatggattttaccaagtcgtcctaaccccacaatgccaattttaacttccctttgaaccatcgcgttttccccctcttttttacattgcttgactagatggctaagcctttaccggttgattcgtttgataaaatgttggcgtctcggcaacattgatcaaaaccggttcttgatccttttgcgaacgaatcgcggcctcggccgtcaccgctgcaacatacccatcccaagcactcgggccgaccggtgactgatccttagccacgtgatcgataaattcctgaacttcggtgttgtacgcttgcaagaagcggtttacccaacttgtttccatagcggtttgctgagttgcttgggtgcgaacgattggctcgaatccgtaatccggtagctttaattctccggtttcgccgacaacttcgagtttgacttcataaccgtactgcgccgtcacatgaaccaacacttgaatgaccgttccttttttggtggtcaatgtggctaattgcggatcccgcaacccttcattggtcacctgacttgactggcgcggataggtgatttgaatcgatgcataatcatcatcaagtaaccaatgcatttcatcgatttcatgaatcaatgtatccgtaatggccatttcattggaataattggccgcaacattaggattaatatgactggcgcgcacaaccaacggcgttccgatgatgcccgaatccagcttagtcttcaaggcatggataccctcatcataccggcgcataaagcctacttgaatgacttttcgcggtttgcctatttccttatccacgatccgtttagctccctcaagggtcgttgccaacggtttttcggtgaaaatgaatttatcggtgtctaaggctttgagaatagtcgcctcatgtgcaccgccaaaactaacaacaaaaacggcatcaatgtccggatcctttaacaaactcgtgtcatccggataaacctttgcgttaagcttaaagtcccgaacagcggcttgggcagcttcttgatcaatatccgtgacggcaatgacttcagctccggttaaaacattggttagccgatcaatgtgtgcacgtcccattgcgcccgtaccgataaccccaactttgacaaccatgtcaatcgctcctttgtattgttgttttcctcagtatttaaatgcctgatcaatacctgtctgaatgtcttgatacgctttttggacgtttggattgtcggatacctcggaaacccccactcgccaccaactttggccgtatccttgtgtcatcgttttaggcagcactttaatatcaattaatgtcgaaactgtttgcttcttggcatcctccaaggcagcgactaaactgtcacgatcattgacgtgataagttttagccccatatccttccgcaattttggcaaaatcgattgttaaaatatcatggtcggcagttctaaattcggttcgatagctgttgctgccttgagccatttgtaagttattgatggaagcaaatccggaattatcaaagactaaaatgttgatcttcttatgatattgcagcgcggtgacaagttctgaatgcaacatgatgaagctgccgtcaccaaccaaggcataactttctttatccggttgtgccaacttaatccccaatgctgccggaacctcgtaacccatcatggaatacccatattccatgtgataggtattgggtacaactggatcccagattcgttgaacatcccctggcaacgatcccgctgcagcaacaataatgctatccggcgcaatcgtgtcattcacagcaataaccgcttccgtctgagtgaaatgggtttgtaacttctcggcatactcagctaatgttgccgcactgaattgacccttaacctcaggcgtataatctggcgcatcatagtttgtatgggccaaacgctgccgttcctgttgccaagcagctttgaggtctgcgaggttggtaaagtcactttgatatccggacaattcactagtcagttgggtcagtgtatcccggacatctgccacaatcggaaagccgtcaaacttatacgactgcatgcgattcaaattaatgttaagcacgcgggttttctccggatgaatagccgtcttggaagctgttgtaaagtctgtatagcgagttccagcaccaataatgagatccgcttttgcgaccacttcattagccgctgctgttcctagaatcccggtaccgcccatattattggcaaacgttgccgaaatagtggacttgccagttggtgtttcaacaatcggaatatttagcttatccgagaaagcttcaattgccgaaccggcttcactgaacttggcgccaccacccacaattaagacaggatagcgactggccttaatgagttgaaccgcttccgttacttccgccgcgctcggttgaatccgcttgatcacatgcacgcgcttattaaagaaactacgcggataatcataagcttcaccctcggtatcttgtggcaacgcaatcgtgaccggacccgctgtttcaggatttgtcagtacttcaaaggcttttaaaagtgcgctcatcagctgctcaggccgttcgatgcgatcccagtaccgcgacaccggcttcaacgcatcgttcgtggtagtagttgcgctgctatccacttcaatttgctgcaaaaccggatccggttgacgtgtggcaaatgtatccgcgggcaaaaagagaatcggaatgttgttcacgtatgcatttcccgccgccgtgacaaagttagccgaacccggacctgccgaagcagtcaccgcaaaaatcttatggcgatacaactgacggctataggcaatcgcagtgctggccattccttgttcgttatgcccttgataaacctttaagtgccccgggtcttcctgcaaggcttcccccaaacccagtacattgccatggccaaaaattgcaaagatcccttcgacaaacggggtgacctcaccatcaacatcaagatattgttggtttaaaaagcgcacgagggcctgcgcggttgtcaatcgaactgtatctgccgcggctgactctgcttctcgtccttgcgacttcaactccattgcgctcatcctaatgcacctcctgcctctctgcttcgtgaataaatgccgtgagtttcgccaaatccggcatcgcttctgaagaacttaattgactaatcacaatagacgctgcagcactgccatacttcaaggcagtttctattcccaagtcgtggctgtaagcatataggaacccggcagcaaatgaatcgccagcgccgaaactcttaagaaccttcgtcttgaaaactccaaaatgataatgatcgccggcttttgtatacgcatttgacccttgaaccccgcttttgatgacaattagcttaggatcatatttgaaaagtgtcgcaattgtctgctcgttcgtgttaccgtgatgattttccagaacatcaaattcgtcacgcgtgccaataatcacatctgcacgctgggcaactaattgataataaagactcgtttcctcggcatttttccaggtatacgggcgataatccagttcaaacaccacttcaaccccaagtgactttgcaactgtgagtgcctttaaaatcgcctctcgcgacgggctttgggctaatccggtcccggaaatcaccaacatcttggcttgcgctaaatattcttctgaaacatcagccgttgtcagatataaatcggcggcttcatttcgatacatcaaaatatcgctttcttcaggactaatgatttcagtaaacgttaagccaattttgtggcccgcatcatccttgaccatttgcgttgtgtcaatgccaacgtctgccatgtattgcgtcacataatgacccagctgatcatcggacaccttcccgatgaatcctactttttggcctaatttggctgacccgattgcaatatttgccggcgatccgccaacgaattttgcaaagctcttagtttcttctaaaggtcgattatattcaaccgcatttaaatcaactgctgctcgaccaatagcaatcaaatcgaatttttgtgacatttgaaatgttccccctcgtcaacttagctgcaaagctatcctttttcattactttcgatcaataatccaggcatgttctggcgcattgtgaaaatgccaaactcgtatcggtcccgccataatgttgaggtaataactgtcatacccatccggcacaccaacaggatgatagcctttaggaacaatcacaacgtcttggttttgcactgccatcgtctcgttaagcgataagtcatcggtatacacccgctgaaaaacaaatccttgcttcggctgcatttcgtgataatagatttcttccaacagcgattctgtcggtaaattatcgtgatcatgtcgatgtggcgggtaactggaccagtttccggagtccgtgtaaacctcgaccagcaataacttatccgcaaatgggagatcatccggcaagatgttttgaaccagacgcttattttgatacctgccgcgatgttcgatttgatgaatatcgcccttaatcaaccgaaccggaaatgaagtcgtggtcggcgagtatgcaatcagaaccttcgcggtagtttgtgcggcaagcttaaaggataagcccgttccaacataaacactgtctgtcggaattttgtcaaagactgattgccgttgaccgataccttcaaaacgctgatcaccggcagtgacggtcactttacccgccagaataacaataccggcctcgaagttacctaaagtctcggcaaatgaacgttgcgcatcaagctccaagactttcactgcggtgtatttcatgggagaattcgttgcattgacgtcttgaatcaaatgaacgcccggctgtatttcctgattttgctttggatacaacaagctcatcgttaatgcctcctcgtcaaacatctggaatttctaattaaaacgatgctggtcatatcttgccgtcacaaccttcttatgcgtgtagaagtccacactatccttgccgttagcgtgtaaggtgccaaagaatgaatgtttccagccagaaaatgggaagacagcaatcggtgccagaacgcccaagttaatacccagcatgcccgcatcaatattttctctgaagtagcgaatagatgcggccgaatccgtaaacaggcaagcgccattggctagttcggactgattggcaatggcaaccgcttccggtaaatcttttgcacgcatcacggacagtaccggggcaaacatctcatcgtgccaaatggtcatgtcggttttgacatcttcaaaaatagttggcccaacgaaataaccatcacgcttctcggcttctgctgacccgtctaagaccagcttggcgccttccttaaccccggtcttgatatagttcaacgtccgttcctgattctcctgacgaatcactggtccaaggaaaacatctttatccagaccattaccgattttgatgtctttagctgcctgcgtaaatttcgccataaacttgtcagcaatactttcttccagcaccaaaaccgacgtcgccatgcagcgttcgccggcggatccaaatgacgaactgataatgcctttaactgcagcatcgagatcagcatcggctaaaacgatcgtgtgattcttagcgccagttaatgcctggacgcgcttcaaatgatcactgccgcgcttatagacatattcgccaactcgttcggatcccacgaaactaattgccttgacatcgggatgatccaacagaccgttgacgacatcgtccgccccgttgacgatgttcaaaacgccatcgggcagaccagcttcttggaataactcaaccagacgctggctggtaagcggtgtcttttctgacggtttcaacacaaacgtattacctgttgcaaccgccatcgggaacatccaacacggaaccatcattggaaaattaaacggggtaatcccgccaacaacaccgatgggataacgataattcgtggcctcaacatcagtcgcaaccgccgagagcgaatcccccatcatcagagtcggcacgcctgccgcgaactcaacattttcaatcccgcggccaacttcggcaatcgcttcactgagactcttaccattttcctgcgtgacaatacgtcccaactcttcttgatgctccaccagcagttgttgatatttgaaaagaatcttggcacgtttaggaatcgacacccgtttccacgtttcaaacgctgctttggccgctgcaactgcatctgccacatcctcgctagtcgaatgcggcacccgtgccaaaacctcacccgtcggcggattataaacatcttcaaaagtatcggtcttagcatcaacccattgaccattaataaaattctcaggtcttaactgcttgttgcgttgcatgaaaacaacccctttgtatagtgagcgtgagccagcgcgcttagaaatccgagtgtaagtgggcctcaaacggtgatgggcggccctttggccattgcggctgaggtccttacacgcagacttctgcgctggcgaacgcgttatgagcgggaaccgggtgcggttagaaaccggagtgtaagtggcctcagacatgatgaccgccctttggtcattgcgtccaaagtcctcacgctggctccatcacccgtttacacacgctcctgtccaattcaagaatggtatgaagcgcttacattttcaaataaattgacttaggaaacttaattcttattaatcttgctcttttcagggaacttatcgtcaaacttgttgtccaattcgatttcctccaatgttctgcctgctgtttccggtgcaaacttccaagcaaaaatcagtgaaataatattggctccgacaaatacaaggaacgtgttcgacatgcctatacttgccaacataactgggaagaaatatccaacaaagaaattaccgatctatcagatgattcgggtgacatttgacaccaaaaatgagttctatgcttatatctcgacaggagtcatcatgatgatccgaccagaccgattggctccttcatgttcttaggcccaaccggcgtcgggaaaaccgaattagctaaagcgttggcagaagcgatgtttggttccgaggacgccatgattcgggttgatatgtccgagtatatggagaaattcagtacgagccggttaatcggtgcagcaccagggtatgtcggttatgacgaaggcggtcagttgacggaaaaggttcgcaacaagccatattcggtcgttttactcgatgaagttgaaaaggcgcatcctgatgtcttcaacattttgttacaagtcttggatgatggctatttaaccgatgctaagggtcggcgggtcgattttcggaataccattttgattatgaccagcaatatcggagcaactgccattcgcgatgataagacagttggatttggtgcaaaagatccaaccgctgacttcaatgccatgaagagtcggatgttggctgaactgaaaaagagtttccgcccagaattccttaatcgaattgatgaaactgttgtcttccatagcttgaacaaggctgagttgcatgagatcgtcaagattatgaccaaaaccgtgcttagtcgtatcaaagatcaaggaattgacgttaaaattacgccagccgggattgatgcgattgccgcggctgggtttgatcctgaatatggtgcgcgtccgatccgccgtgccttgcaaacggatgttgaagaccaactcagtgagctattgctggcgggtcaggctaaaaccggtgacttgattcaaatcggcgctaaaaaaggcaagctgacgtttacagtcaaggaaaacaaaggtaagcataaagaaaacggcgcttctaaagaacctgtcaaggcatgatcaatagcagccccaaatatgtcaggttccactaataacgcttaaaaagatcggtcttagaggtgaagcattatctctgggaccgatttattttgcaaaaacagtcagtgatggcgggatacgatttttgatgctatctggtattgcattactttgaaaagcaggtgcttgacattgttactccgcacgcgtattattaaatcaatcgcatttcggtttggacaggctgtcaggac

SEQ ID NO: 42 - DNA, 1013 bp, LACTOBACILLUS RHAMNOSUS
gctttcggcattcatataggcaaccattaatacttgcttggtcgttgcgtcttgaatgacggttgtgattaaaccggacgcctttttaaaatcgagtggtatcatcgaatcgccacctttgcttgttttagaactgtcttgacttgcggtatcgttaattcgccgaagtggaagattgaagcagcgagtcccgcagaaacattcgtattacggaataaggcaacaaagtcatttgcggatccggcaccgccgcttgcaacgacaggcaccgtaacaatggagctaagttgctggtaaagtcgcaggtcaaatccttgcttggtcccatcggcatccattgaggtgatcaatagttcaccggccccggccgcaactgcttgctgagcccacgtgagcactcctagatcaactggggtacgcccgccgttaatcatcacctgataacgattccggctaggttgccaacgcgcatcaatcgcgacaacaatcgcttgacggccaaacttttcggccccggcggtaattaaatcagggtgtttgaccgccgcggaatttaaggcaattttgtcagcaccggcacgcaacaattgatgcatgtcggtcaccgaacggataccgccgccgaccgttagcggcatgaaaacctgtgtggctaccgcagcgactgtttgcgtcatggtttgccgcgcatcggtggtggcggtgatgtcaagaaagaccaattcatctgctccctgcgcctcgtaagctttggcaatcgctaccgggtcgccgacatccttaagctggataaaatgaaccccttttttgacgcgtccttggtcaacatcaaggcatggaataatgcgttttgtcagcatcgttgtcctccaattctttaagtttgttcaagggaaaactgccggtctgccaagctttaccgataacagccgcctggataccggctgtttgcaaggctgtcagatcagccaaagtgtgcacgccaccactggccacgatattgacgttaggca

SEQ ID NO: 43 - DNA, 7488 bp, LACTOBACILLUS RHAMNOSUS
  MISC_FEATURE (1)...(7488): N = A,T,C OR G
ggaaaccaaaagagctttctggtgggcaacagcagcgggtgagtctggcgcgtgctttggcaaccaaggcgccggtggttttaatggatgagccgttgtcaaaccttgatgcccagttgcgaaccgaaatgcgtgaagaaattgcgcggttgcatcgtgaaattggcatgaccttgatttatgttacccacgatcaagtcgaagcgatgaccatgggcgatcggattcttgtgttggacgatgaaaagattcagcaactaggcaccccgctggacttgtataatcatcctgccaatgaatttgttgccaagtttatcggcagcccagaaatgaatctgctgccaattacggttagcgatgaaggcgatcgctttagcattggcgatactttctggactgacaatgcgtttgtccttccgtttgacttgccggctggttcctatcatcttggcattcggccggagaagttggtaccggtttcgattgccaacccggataccattacagccaaggtgaagagcttgcaacagcttggcaatgacaccttgattttctgcgactttgatggccagtcattggtcagtcgggtaccggaacagttcaccgtagcggttggcgctgagcttaatttattactgccggctaatgccgatgaatggcatctctttaatattgatgacggtgagcggattgccgtggcgccagttaaggaggcggccgcttatggagcttaataaggaacttaataaatcgacggccaaatcgcaaggcaagctcgccgcaacgattcgggaaaataataagccagcattctggtttttgatgccgtcacttttgatcctaactttatttaccttttatcccatggtcatgacggtgtacaacagcctttttgcaaccaacattcgtggcgaatcagctaagtttgtcggactcggtaactatcttgatattttcaaggatcctttattcctgaagagtctgacgggcactttagtctatgtcgttgcctttgctttggcgaccatcgttcttggtgttattttggcacgtttggcaacgatgaagttacgccggatcagttggttccagacggcatttgccggtacgatgggcaccagtgccgccgctgcttcgattctctggctgttcttgttcaatccgtctgttggcctcgccagttttgccttaaaagcgctgggcgtcaccaatgccaacttgttggttgatccgaccggtgccatgattgtcatcgttttggccagcgtctggatggcattgggttttgcctttctgattcttctgagtgcgtttcaaagtgtgccgccagaatactatgaagttgctgacattgctggttggtcacaattcaagcagacgctcaagattacggttccgatgatttcgccaaccctgttcttcttgtttgtggttgaaatcattgatgggttcaaaatgtttgcccagattgacttaattacaggcggcggtcctaacaatgccacgaatttcctagcatataagatttatcaagatgcctttgctttccacaactttggaacggccagtgcggaatccattgtgctaaccgtcattattgccttggccacttgggttcaattccatttcacagaacggaaggtgtattacgcatgacacatgtcaaacacggagcacgttatcttttattgacggtggttgcggtgatacttttattcccgattctgttggggatttgggcatcgttactaccgacaaaagatattgcggcagggaacttcttatccaccaatatctcgcttaataactattggcaggcgtttgtcaccacaccgattattcgctatatgattaactcgtttgtgaccgccggattaatcaccatcggccaattagttttatgtacacttgctgcttatgcctttgcgtttatgaacttccgctacaaaaagcagttgttctttgcctttttgatcaccatgatgctgccgtttgaagcccagatcattcctaattttcagacggtaaaagcactcggctggctgaacaattatgctggcttgacgattccatttttcacttcagcatttggggttttcatgttgcgtcaagcctttttgcagattccaaccgacttggtggactttggtaagtatcttggccttagccgcctccagtttctttggaaaattgcggtgccatatagtcgcagcatgttgatcaccttttccctttatacgttcctgacccattggaaccaatacctgtggccgttgattacgactttctcggatgatttccggccagttcaagtcggcttgaagcagttacaggcggaagatacgttcgccaactgggggatggtgatggccacggcgatcattgtgttgttaccaaccttggcactgttgcttattggccagaaattcttcaagcgtaatttgaatgcaggggggacgaagggttgaaaaccacatataagaagattattgcgatagtcgcagcgattgttgttattttcggacttggctttttcttcacccaccaacaatcggccagtgctgctgataacaacgggcgcacgaccatcacgttttggcactcgatgaatggcccgaatgaaaaggttctggaaggcttagtcgatcaatttaacaagagtcagaccaaatacacggttaagccgatttacgccggcagttatgaattgtcgattatgaaatatgccaatacggtcggcagtaatgtttcgcctgacttgattcaaagtgatcaggccaaccagtctatgatgatcggcttgaattcaacggtaccggtacaaaagttcattgatcgtgaccactatgatttgagtcaattgtatccaggggtgacagccgcttataaaatcaatggtaagttagcttccatgccatttaactcctccagctcggttatgtactacaaccagagcctgtttaaaaagtatggtattcccgatttgccactgtcaccgacgtatagcgacgtgaccaaggcagcggttgcgttgactcaaaagagtaaaggtgcggtcaaagggatgacgatgcagatctatggctggctgccggaagagttggttgccaatcaaaattcacttgtcgtcaaccacgataacggccgccaagcgatggcaaccagtgccacattgaactcgccggaaatggtcaaaagtatgaattggctgcaagacgtgatcaaacaaaacgccttccaaaactttgggaccggatcagcagctgctaacaaccagagcgcggcgtttttggcgcaaaaggtcggcatcttcatgcaaagttctgctatgttaggacagttacaaacgaacgccaaatttaaatacggcgtgaccttcacaccgcatccggatggtaccaaagcgaatggtgtagcgattggcggcgcaagtctatggattactaaggacaaaccaaccgctgtccaagaaggggcttggcagtttatgaagtatctaatgacgcctaagtctcaagcaacatggcaactcggcacgggctattttgcggttaaccaaaaagccaaccaagtaaagagcttggctgatgcaattaagaaaaaccctgctttagcggttccgattgaacaactgaaccaaggtcatatcaatgcggccacagcaggtgcgttcttcagcaatatccaagaagaacggcaaaatgttgaattggctatgcaacagatttatggcggtgccgatgttaagaaggctttagatgaagcggaagccgatacgaatacggccatttcaaagaccaattccgtcagtggcaacctgctggactacaagcgttaagttgccagttgcatccatattgcccaacgaccgtaacccgcgtatgatcaagataacgttagacatcattatcgcaaaggagctggtcgtgatcatgccaaaagtctattttctctgtacagggaatgcctgccgcagtcaaatggcagaaggatttgccaaaaaattgctggggcgtcagtggcaggtaaaaagtgccggcatcgaagcacacggcctaaatccactggcggttaaggtcatggcagaaaaaggcatcgatatttcgcaacagcaatcaaaagtgctcaaagaagccgaactgcagcaggctgatttgattgtgacactctgcggggatgcgcgggatcggtgcccggtgacaccgccaaccgttcgccgtttgcattggccgctggcggatccagcagcggcgagtggttcgcaagaagcggtgttggcggtttttcgccaagtccgcgatcaaattgaagctcatgtgcgggccttgaaagcagacgcctgatatagcttggcgcagacggtttttgatcagtaaagtatgcgaaatggaggctcatgatgacagtagcaatttatggacatcgcggttatccggcgcgttttccggagaatagtttgcaaggattcgaatatgcctgtgagcatggcatcgatggcattgaaaccgatgtgcagatgagtgcggatgggcatctggtgatcatgcatgatgaacgggttgatcgtacaaccgatggcactggctggattgcggatttaacccggacgcaactaaaagggatgcggctggccaatggcgaacacattccatcgcttcgggaagcattgacggttttaagccattatgacgtgatggttaacattgagtttaaaaccggcaagatccgctatccgggcattgaggcgctgacgcaagattacgttgagcagttcaatatgcaggatcgcgtcatctactcctcattcaatcacgacagtattaacgtcattcatacccttgcgccgaaaatgaaaacggcttggttaacgagtcgggttctaaccggcgccaccttaccatcgtatttggaagccgtccacattgaacattacaacagccacctcaacaaagcccagcgcgtctggacagttgatgatccgctgaaaatgaaacaactgatgcgcgaacgttacgtcaccgggatcattaccaatcgttttgaagaagcaatggatatgcgcgacttggtggccaaagaagctaaggcgccggtttaaaatgcagctcaaggcgatgtttaattcacgaaattaaaaaactgctttggaagcaatcttgctttcgaagcagtttttgatttttatactcaaaataagaaacgcctaaaaacacgcgccctgatcaattttgatgatgttcatcaatcaatttctgttgtaacgctgccaatttcggcgtgaggtaaaccggatagagatccggattaacgagccgttgcgttgcttctggtaagtgtccgagtgctgtttgcatatgtttttgaatggcaaagacatcggtcgtgagcggctcttgtgcttgagggaagaccggttttaataacggttcggcagtgaaatcgcgtaaggtgacttgcgtttgggtagccagcgggttggcattgaccgcggcaatttctgcaggcaggttttcgtcagccaacgcaatgacatccgcaaaagccgtttgatcatcacagtgatacaggcgataaacctgtttatgacttggtaaagtggtcttttctcggctagcacttaccttgattttaggaagccacttgccgtttgcttgcaatgcggtcattttgtaaacaccgcttaaaaccggagatgaggcgctggtgattaacttttcaccgattccaaagttgtcaatcggtgcgccttctttaagtagggactgaatgacggtttcatcaagcgcattggaagctgtgattttggcatccggggaagccggcgtcatcgagcattttccgggcttgtttcgctagctgggtgatgtcgccagagtcgatgcggataccaacggggtgatggccggctgcccttgagttccttaaaaacggtgatcgcattgggcacaccggacttgagcacatcataagtatcgaccagcaacgcactgttgtcaggatagactttagcccaggcacgaaaagcggtgagttcatcggggaaggcttcgatccagctgtgggccattgttcccggcagccgggatgttgaagcgttgtgcagccaagacgttggaggtgctggcacagccgccaatcacagcagcacgcgctccataaaccgaggcatccggtccttgcgcgcggcgggcaccaaattccataaccggccgtccttcagccgcagccgtgatgcgccgggctttggttgcaatgagtgactggtgattgacgatgttgagcagcagcgtttccagcaactggacctgcatcagcggcccttgcaccgttaacagcggctcacgcggaaagacgggtgtgccttctggtaaagccgtcaccgtgcaagctaacttcatcgtttttaaatagtctaaaaatgtatccgaataaagtttcaacgaacgcaaatatttgatatctgcatcctcgaagtgaaagtcgcgtaacgcttcaacaacttgttgtaacccagcggcaataacaaaactgccatgatccgggacattgcgatagaaaatatcgaaaacggcctggtcttcatgcggtaaggtcgcacaatacccattggccatggaaaattcatagagatccgtcaacattgcttgattcatattcatctttaaaagccttctttatcagtccgtggttaattaatccgttacttcggcgcccaaaacatgtgcaaagtggtccagcgcccagtcctggccagctggcgtcaaagccgcaactgcatttttatggacgacaatttgatagttgagattgtaagcatcaactgccgtatgcaaaacgcagatatcggtgcagacgccgactaaatgaacggtgtcgattttgcgttcacgtaggcgcagatccagcggcgttccggcaaacgcggagtagcgggttttatcaaacatgttcacccgttcttcatctttatgggccgcataccaaggcgcaagcgaaccaaagaacgcccgcccccaagtcccgcgaacattatgcggcgggaacagtttgctttcgggatgatacggatcgtgcggtgtatgcacatcggttggcaagtatacccagccatcttgttgcaaaaattcatcagccaaagcgacaatgtgaggggccaacacttgcccagccgcgccacaggtcaaagcacctttatcggcaacaaagtcattagtatagtcaataatgagcaatgcttcatttgaatgagccattattgaggctttctttctaattaaagtaaaatttactttaaactcacgtagtataaaagtacattagactttttatttgttggtctaccatacgcggggttccgggtattttttaacttggcaagtttaaaacaatttaggtgggacatgcccttgggccgggcgatcattgggcaggtgccgattttaaacaaaaaggatgctgggggcggccttttttaaggntagaggtcgt

SEQ ID NO: 44 - DNA, 1449 bp, LACTOBACILLUS RHAMNOSUS
ggatctggttggtattgtacaaatggaaaaattaaataaactggacgtctttaagtatttttaaccattactaacggtttacacgcaacgtaacacgccagatattgaggcttatttaccgggggctccagaaattcaggccacgtgtcgtgtttaatagagaaaccaaagtgggcgactaacgcagaaaactgcgttggtcgcccgctatttttgtttgaacccagggatctgagataccatcaatggttaagattcaacccggttcggtgtggagtgcttacgatcattcaatcatgatcaaatagtgaatctacttataactactcaacctcagcttagcaataacggcactagtccaattaacatcatacccattgatgatccatcacctgtttgaggtaatctacttgttttatcgtacattttaccttgagtgaaatcctttggtgttaccttattcccattattaggaacttgaggttccttaggcgttgtcgggttattaggaacctggggcttcttaggcgttgtcggattatgggtattagtaatattgtaaccatcaacagtactggtgtaccccgcaactgcatcttccgtaactgtgtaggtaatcttctgaccattagcataagcagctaagttgtcgaaactgtactgccagttatcactggcagtaactttcttgcttgcaacttgttgaccattggccaatgagtttaccgtgattgaacttggacggattccatcttgattgttgttatccctccaagtcttcgtccctgaaactgaggttttctcaatcttatcgataattttaataacggcccctttttaatcaaaatttgtagaagttacgattaccgtatctgctaattgatatcccttagaagctgtctaaaatctcttaagaagctgtttagtatctttgattttgacccaataatttgataaactactgtcaaaaaagttggtgatcatatgcaacattttagtcatcattaccaaagcgatatttctcggcaacaattggatttgatccgtcaggatctggaagcttcaagaaaacgaactcacccaaaacacattgatccttatgatatcttctgtgccatgctctatgtccttaaaaatggctgtacttggcgtgatttgccggctgattatccaaagtggtccaccgtttactactattggatgagttggtcaaaagcccccacccctgataaaccagctttattaactcaggttttaaaaaaattgtcgctgatcgacgattaaggcaagggcggtcagcccgaacttcgttcgtcattttagatgcccaaagcattaagaacaccgctaccgctgaaaataagggttacgatggtggcaagaaaatttccggcattaagcgccatttagccgttgacatcaatggattcccccaagctatccatatta

SEQ ID NO: 45 - DNA, 3549 bp, LACTOBACILLUS RHAMNOSUS
ggcttctttgagtaacgggcgcggcatgccgatgttgagacgcacgaagccgccaccatcagccacaaaatagctgccgaccacacaggacaaatcagcagcagtaaagaaacgtttcagcgccgtttcatcagggaaaagccgctgggtgtccagccaggctagaaaaccggaatcggaaggcatcacctgaatttccggtatgacttgcaaacggttgaccaagtaggcaaagttagcggcgacataagccaccatttcatccagccacgcatcacaatccgtataagcagcgatgagggctggcacggcaaagctattaggtgaggtaatcgaattggcgacgaattgagcgttgagtcgggcgcggatcgctgggtcagggatgacgacataggacgttttcagaccgcctaaattgaaagctttattgggtgataaacaaagaatactttgggattgaatagctgggcaggcttgccagatgctggtaaatgtgacgccgggataaacaatgtcccggtgaatttcgtcactaatgagtaaaacctgatgctggcggcaaagttcacccacgcgtgctagttcttcagctgtccagacgcggccggacggattttgcggactgcagagaatgaacatcttaacgtccggccgttgcattttagcggccatgtctgcaaagtcgaattcgtagcgattgtccacaagcatgagcggactggtggcgagctgacggtggttattgcgcacggcttcagcaaacggatcataggccggcgtgttgattaacaccgcttcattttgttcggtgaatgcctgaaccaagtagtggagggtcggcacggtgccatagctgagtttgatccagtcttttttcagttgcaacccgaagcggcgcgcgttccatgcgatgactgtctcataaaaggcttcggggatgtaagtgtaactgtagtcaggtacggccgcgcgtgtcataatggcttggtgaaatcgccggggcaaccgggaagtcaaaatcggcccagtccatggatatcgcattggccgtgagccccaaattttccgcgagcacttgatccgccccctttcgcgctttggcgggctttgcgatcaaaaaggcgattaaattggctcatgttcaagcacctccaattgattcatctgccgagatgtttggtttaacacgcgcgcgccggtttcggtgatgacaacatcatcttcaatgcggacgccgccaatgccgggaagataggcgcccggttcgattgtgacaatcatacccggcgctaaaacggtttgactgcgggggttgagaattggctgatcgccgcctagtcccaagccgtgccctaaaccatgcgtgaaacagtcaccatagccagcagcggtcaaaacgccacggacaatggcatcgacttcacgaccttgcatgccaggcttcaaagcagcaattgccgtttgttgggcgtccagaaccgccgcatggactgcggcaagttctgcgggtggcttgccgatgctgagtgtccgcgtcatatcggactgataatcagctaaaacaatcccaaaatcaatggtgatgagttcgttttcctgcagtattcgctcgctgggtcggccatgcggaaacgcaccccgcgggccactgggcgataatcggatcaaacgccatccctgttgctcctgcttgcagtgtataaaaatataaccacgcattaagcgtttgttcgctgatgccggggcgaatatgcgggaggagttgggtaaaaattttgtcagtcatcgcacaggccgccgcaactgccgcaatttccgcttcgtccttgcgcatgcgttgttccatgatcaagtcatccgccaaactgagcgtccagttctgggcagctaaggtctgaaattctttaatcgaaaagccgttgctcaccaagccgatgcgccgactttgctgggaagttaagaagtcaatcaattgcggtaagtaagatccctgaggcacttcgatatttgtaaatccctgggtatctgcggcctctgcacgatagcggccatcgtggatttgcacggcctgcgttggggtcaccacgacatacacaccgctgccgggcaacgcgccgacatagcgtttactttggcgatcatgcagcagcaacgcgtccaaatgttgcgcgccgatcgctttttgtaagttggttaaatgattcatatgagcctccgttttaagtgcattgtttttcgaaaaagggatgcccgcgcaaacggtgcggcatcccattgtgagcattttttcagtaaccacagcatgcggcctgattagaagtcgagatccaagccagccaaggtatcctcgtcttcttttgaaaagattgatttctgcgatgctttcttggcttcattcttcaactcggcacgttccataaccttgaagaatggccagtacaaagcgactgctaggaacagctgcaaggcgttggctaggattgtccggtaatcgccattgattaagaaaccttccagaaagaccccaacgtacggcgggttgaaaatgggtttagcgatccaaccccagtgcatgaagaacattggcagggtgccgataatggcgccaccaaagacgtgcgggatgaacataatcggattcagaataatcggtgccccgaacagaatcggctcattgatgccaaacaaggcggggaataaggaaattttaccgattttacgataccgcttgctcttagacagcatgcaggcgaccacacagccgatggaaatgccgcaaccggtaaaaccaaagaaacttgaaacggcgccggctgtgtaaaaatgcggaattgcttcgccggcgttcattgcagcaatattttcggcgatgaacgtcaccataatcggactggtgatcggcgagaaaaccgacgagtgaattccaaagaagaagacagtacaaatggcgaagttaagcgccaagacagcccacggattatccatactcccaaccaatggcgccaagaagcgagtcaagatgcttggcggcagctcaccagccagattcaagaagataaagcggccggcaataaacgcaccgccagtaatgagtgtgaccggaatcagctcgaacgaacgggaaacaaaatccggcaccccatccggcatcttgatcgttaagtggtgagttttgcaccagtgatataactcaaccgtcagcaaggcaacaatcatgccggtaaataaaccgcgagcgccaaggttggcgacatccagttggccggttttgttaaaagttgcgaccatcatcaaaaaggcaaaacccgacaaggtgacacatccgggaatataaagcttgtaatgattacctaagttgtaagcaatggataagcaggcatacaagccgatcggcgccgacaacacttcgctaatgtcattgaaaacgcacgcggcaatggcagttacaccgatgaattggcaacgattgtgtcggcggcattgcgtggacaaatcgccatcctctttgttcaagccggcgcacgcattcacgcgcggcttgaaggt

SEQ ID NO: 46 - DNA, 4865 bp, LACTOBACILLUS RHAMNOSUS
ggggctttaaaaaccggcaagattgatttgatcgtctccggtatgtccaaaacacctgaacgggaaaaagaggttaacttttcaaccccttacctgtatgaaacgcaagtcatggtcattcgcaaggccgataaagccaagtacaaatcgattgccgacttttccggaaaacgagtaggggcacaaaagcaaacgacgcaggaacagcttgccaagacccaactgcccggtgcaaaagtcacgagcctggataaagcaaatgatgtggttgcacaaatttcgtacaacaaattggacgccggggttttggctagtaccattgccgactcctatgttgcccggacaccgagtttaaccgtgattgacccgcattttgcgactgacaaagccccaactgccatcgccgtcagcaagcaatcgcctgccttgttaaaacaagtcaacaagacgatcagcaaagttaaaggcgccaaatacaaaagttatctgcaagccgcctacaaactacaggatcaggatcaaggcttctgggctaagtacggtaactactttatccgcggcgctatttatactttggtcttcgcggtcttaacagtcttattcggaactatcatcggcacgctgcttgccttgatgaaactcagtcgcaattggctggctaaagtggtggctaacatctacatcgagtttattcggggtacgccgttgttggttcaagcgttcatcgtcttcttcggtacgcagatcctcggtttagatctcagcgcatttgttgccggcgcgatcgccatggctatcaactccggcgcatacgttgctgaaatcattcgtggcgggatcaattccgtccctgtcggtcaaaccgaggcggctcggtctttgggtctgcaccaaagccaggcaatgcgatacgtcattttgccacaagcaatgaagaacatctggccggcattaggcaatgagttcgtcaccgatattaaggaaagctcggtcttgtccgttatcggtgccaccgaattaatgtttgaaggtaccgttgtgcaaggcgcctcgttcaaaccattcctaccactggtcgttgtcgccattctttacttcatcatgacgtttaccctatcacgactactacgcctgattgaaaaacggtttaattaacctttgctttagcacgcctgccataacgcgctcacatttattaagggaggatatattttcatgacagaaaaaattgtactagcctactcaggtggtcttgatacatccgttgcgattccttggctcatggacaagggttatgaagtgattgcggtcgtcttgaatgtcggtcaacccgggatgcggattttgacgcgaattaacaaaaagcgcttaaaagtcggtgccattgattcgattgtcattgacgcccaaaacgagttcggcgatcactatgttgcgccggtcatcaaggccaatgcgttatacgaaggcgactatccgttagtatcagcgttgtcacgcccattaatcatcgagcatctggttaaaatcgcccacgcccaaaatgccaccgcaattgcgcacggttctacgggtaaaggcaacgatcaggttcgctttgaagccgcgattcacgccttggatcccgaaatgaaaatcgaagcaccgattcgtgattttcactggtcacgagaagaagaaattgattacgccaaagatcatcatgtgccagtcccaatcggcaaaaagtcaccgtactcaattgacgccaatctctggggccgtgctaacgaagccggaattctcgaaaatccttggaatcaggcgccggatgacgcatgggggatgaccgttgcccctgaagcagcgccggataaaccgacttttcttgatctaacctttcaacaaggggtcccagtagcattaaatggtaaccccatgccgctggctgccatgatcaaacaacttaatcaaatcgccggtgcaaatggcattggtcggattgataaaatcgaaaatcgtctcgttggcatcaaatcgcgtgaagtctacgaagcaccggctgcagcagtcatcatgacggcgcaccacgatctggaaaacctcacgcttgaacgcgacgtccaacatttcaagccaaccattgagaataaattgacgaatatgatttacgaagcccaatggatctcacctttattcgatgctttgatggctttcatcgataaaacccaagccgtcgtcaatggcaccgtcaagatgaaactttacaaaggcagtgccgtcccagtcgcgcgtcagtccactcacaactcactttacgatgaagacctggcaacctacaccagtgccgattcctttgatcaggaagcggccgcgggcttcatcaaactttggacgctgccgaccactgtctttgagcaagtcaaccatgttcactccgaggaaaagcaacatgactgataagctatggggcggccggttcaccgaaaaagccgcgcactgggttgatgcattcggcgcatccatcagttttgatcaacaaatggccaaagaggatcttgaaggatcgctagcccatgtcaaaatgctaggcaaaaccggcatcatcccgcaagccgatgccgacacgatcaccgctggcttacatcacctgcaaaaagaactggcagcaggcaaattgcattttaccgttgaaaatgaagatattcatctcaacatggaagccttactgacagccgaaatcgggccagtcgccggcaagctgcacacggctcgttcccgcaatgatcaggtagcgaccgccctccatctatggctcaaacatcgcctgcctgctattaaagaggccttgacgaacctgcaaaccgttctcgttggtcaggcgaaggcccacgccgccacgatcatgcctggttacacccacatgcagcacgcccagccaatcacctatggccattatttgttggcgtatttcgaaatgttccagcgcgactgggaacgtttcgactttacccaaaagcacaccgacatcttgccattaggcgcggctgcactggctggcacgacttttccgattgatcgcgaacttgtggctcaggaattaggcttcgatcagctgtatcacaacagtctggacgccgtatcggatcgcgactttgcactggaatttctcagtaacagcgcgattttgatgcagcatctgagtcgcatggccgaagaactgattttgtggtcaacatttgagtttaattacatcgaactcggcgatgacttttccaccggcagctcgattatgccgcaaaagaaaaacccggattttgccgagctgattcggggcaaaaccgggcgcgtatatggtgcgctgatggggctgctcaccaccatgaaggccattccgctggcgtacaacaaggatatgcaagaggataaggaaccgatttttgatgcttataacacgatccttggctccttgcatattttcaccggcatgcttagtgatctcacggtgcatgaacagcgcatggccgccgccacaacgcatgacttcagcaatgcaaccgaactggcagactacttggcaacaaagggcgttcctttccgccaagcccacgcaattgtcggcgagttagtgctaaaaggcatcaaaaccggcacggcgcttcaggaaatgccattaagcgaacttcaggaagccgcaccgcaaatccaagaagacgtctacgcagaactcacctcaaaagcagccgtcaatcgccgtacctcccttggtggaacagcggttagcaacgttttgaaagaagttgcccgcgatgagaaaatcattgccgatcatgaaaacgcggcaccttccatgtaagtaaagcaacgatatttgaagttatgcatcacgacaaaataaaatcggtcttagagtggcaagacgctctaagaccgattttgctttccttacgacatttgaatcaacaaggacacaacgacttcaatcattaccttgtgcgtttttgcaaactaaacgttgaccacggtttgattagcgttaacagatctgcgtcatcagccgcaacatggccaattaaattccgctggccatcatcgctaaatggtgtcaaaacaatttggaattcacctttatagcggccatacgcatcgttgacgatcacaatatcgccgcgtttgaagggttggccatggtcgtgggcgggaatactggccgtgctatacgtgatacgaggctgggtatcccgcagtaaatacgccgatgcatccccacgatataaatgcggcgcggcaaatgctattttttcttcaagcggcgtgatacttgccaacatttcggcatgcaagatcgggtatggcgccaggaaagtatcggcaacggttttgagttccgcttcagtcgcgaaggcattaccgatgatcacgtcatcaatcaagccggtcagacacaaatgcgttgtttgactggcaatgttgcgatggcgatcagactccattgtcggtaacccatcatgcagcggccaaggcccgattttaccgctggctgacgacacaaatgcggcggtatgcaatccatactcccggtactgctgggagtattcggtaaagatagcctcactcagacctgtgaacgcctgcggatagaagttatgacagccgattaggttatcgcggttaggatcataagccatgatgctcgcaagataattggtcccatggctcatattcaattcgatttttaagccatagggattgcgggtcatccgcgcttcttccgcgccggtgaagccttcatccagccgcagtccccaaacatgaagcgtttcaaaaaaactcagatcgtcatagctaatcttcagctccttgaacaacgccggattaatatcaac

SEQ ID NO: 47 - DNA, 9962 bp, LACTOBACILLUS RHAMNOSUS
ggtccgataatccagcaccccttgaatactttccaagtcatgcttggctttggcaactgcctcaggtaaggtagcggccccggcaacaaccgaaaaaattctcccggcgtcactgatccaaccaccgtcagcgcgcgttacgcctgctggcagccaagtaccgattggccaatttgttggcacaatgacgggaacggttttcagatttgcccgcggataatcgggattcaccgcgacaaaacaggcataggctaggccattcaatttcagcgttggctgctggccatccaacaagtcgctcacaagctgataaaagtcattttcaatctgtggcaataatacctgagtttcaggatcaccgaaacgcatgttgtattcaagaatcttgggtccctctttagtgaagatcagcccaatatacataaccccgtgtccatttaaaccatcttggtgcatgcctgccaatgtggcatccaccaaggactgggccgcctggacttgatcgggcttaaattgtggcaacggactaatcgcacccattccacctgtgttaggtccacgatcagcagcgtggcgccgtttgtgatcctgggacaacggcaagatcacgcgcttttggtcattaaaaagtgccatgacggaagcttcttcgccagcgagatattcctcaagcaaaaccgtggcatccgggtggccggcgtaaaactgttcgatcgtatcatcaagtgtcgctgcatcattggcaatgacaacacctttaccagcggccaagccatcttttttcaggacaagcggtaaacccatcaaagttgcttcggcatgagcttcaatcgcactgtgaaccgtcttgctggccgcggttggtaaatgatggcgatgcataaacgttttggcgaaagttttactcgattcaagttgggctaatttttgcgtgacgccaaagatcggcaacccgattgcttgaaaatcatcaacaatccctgctgccaaggggacttcaggaccgacaaacgtcaaatcaatctgatgcgtttgcgcgaacttgattaaagccgggacctctttttctttaataccaatcggctcaacaccaagcaactccatcgccggattgcccggcgccacgtagacatgatccacttgtggcgactgactaaatttcaaagcaagggcactttcacgcgcacccccaccgataaccaggacctttttcataaaaacctcctaaaaaagtgagcgtgaaccggcgcggttaggagtcggagtgtaagcggcctcagacgtgatggcccgctcttggccatcgcggctgtggtccttacacgcagacttctgcgccggtgaacgcgttatagaaagtgagcgcgagccagcccggttagaaaccggagtgtaagcggcctcagacgtgatggcccgctcttggccattggcggctgaggtccttacactcagacttctgggctggggagcgcgttatagaaagtgagcgtgagccggcgcggttaggagtcggagtgtaagcgggcttggacgtgatgacccgggcttggtcatttgcgcccaaggtccttacacgcagactcctgcgccggagaacgcgttatggtgaacgtgaaccggctcccgcttaatgccggaaatgccgaacccttgttgtcaccttcgcaatgccatattcattggccttcgcaattgaatccttatcccgaatgctgccgcccggttgaataatcgccttaatatcatgtttagccgcgtaatccacgcaatcatccatcgggaaaaaggcatcgctggccatgcccgcaccggcaaaagttgtcgttttgctgggcttgggttaacgccaattcaaccggagccaatccgattcatttgaccggcgccaatccctaacgtctgatcagcctgagccacgacaatcgcattactcttaacatgtttgaccaccgtctgagcaaatgccaatgccttgagttgagcttcagtcggcttgacctccgtcaccaccgtcatatcggctggtgtctcagctttgtcgtcacgtgtttgaatcaacaacccaccataaattgaagttgtttctgttcccaattcttctggcgtatcggcggtattaatcgtcaataagcgcacatttttcttcttcgccagaatctcataagcatcatcatcaaatgccggtgccatgatgatctcaaggaaaagtttatgcattttctcggcagtggcaagatcaacccgccgattcaaagcaatgatgccgccaaaaatggacatcggatcggcggcatatgccttgtcccaagcggcttcaagcgtatcgcccaagccaataccgcatgggttcatatgtttaacggccacggctgccggttgtttgaattcccgcaacattgccaatgctgcatccgcatccttgatattgttataagaaagctctttaccgtgtaattgcttagcagcggcaagactggttggatcaggattcggctcaacataaaaggcagcttgttggtggctgttttccccgtaacgcaagtcctgccgtttgtgataagttggcgtgaactgctctgggaaaggctctggatctaagtaatgggcgatttgagcatcgtaagcggcagtggcggaaaagactttggctgccaaccgttgccgtaaatcagcatcattttgatcgagtccggctaaaacatccgcataatctgccggatcaaccacggcccagacgctgtcactatttttagctgccgcacgtaacgcagacgggccaccaatatcaatttgttcaatcgcctcggcacgcgtcacacccgcacgctgaatggtcgcggcaaacggataaagattgacacaaaccacatcaattggctgaatatcatgatctgccaatgcctgcatatgggcaggatcatcccgccgcgccaagatgccggcatggatcttaggatgcagtgtcttaactcgaccatcgagcatttctggaaaaccggttactgcttctacgccggtcaccgcaaccccagcttcagccagtgcgcgatgggtaccaccggtcgaaatcagttcaaaaccgcgttcaaccagaccttttgcaaaaggtaccaaaccagttttatcagagacacttaataatgcacgcttcacttaaatcgctccttcttcaatgagttgcttgacagttgcgggaaaagtttgatgttcctgatggtgaatggctgcttctaattgtgccagcgtcatccccgggcttacgcggaccggatcctgtgcgatgatttcgccggtgtcgattccggcatctacgtaatgaaccgtcacgccggtcactttgacgccataatcaaacgcatctttaatgccctgccgtccgggaaaactaggcagcagagcgggatgcaaattgataattcgctttggaaaagcatttagcaaggttggcccgatgatccgcatataacccgctaaaatcaatgcatctacaggcggcaactggcttaaaatataagtttcggccgccgctttattcgcatagtccttaaagttcacaactaaagtcggaatatgacgagcagccgctttttgaatcaccggtgcttgcatttgatcacagactaagaccgcaatttgatagtgactgtctacagcctgcgcggcgtttgccaaggcttcaaaatttgtgccatttccggacgcaaagacagctagacttttcatttacttgccacctgccattgtattttggcgcttggatcagcaaccacgtgaccgatgactttgctgcttggtaacgccgcctgaatcgtggtggctgcatgttccgggacgaccaaaatcatcccgatgcccaaattaaacgttgtccgcatcgtggtttcactcaaatgcccggcatgttgcaggcgatcaaataactccggtcgatgccatgcctggggattaacctgcgcacacaatcctgccggtatcacccgcggtagattctcggtaataccgccgccggtaatatgcgctgtggcgtggatcaaaccttgttgcatgagcggcagcacttgcttaacgtaaattctggttggccgcatcaacgcctgcatgacttccgatccgtcttcaagcgtctgaccgcctagatcggtttcagctaacaatttacgcaccagcgagtaaccattgctgtgtacgcctgaacttggcaagcctattaagacatcaccagcagccacgtccttaggcaaacgattctgttcggaaaccaaaccaaccgcaaacccggccagatcataatgattttgtgggtacatatccggcatctcagcggtttccccaccgatcaacgccatttccgcctgctgacagccgtaagcaatcccgcgaacaaccgcttcggcccgggtcacatcaagatgatcaacggccatataatcaaggaaaaataatggctgggcaccggatgcgagcaagtcattggccaccattgcgaccaaatcaatccccaccgtttcatgcgcatcacattgcaatgccaacaacagtttggtaccaaccccgtctgtcgcactaatcaaggttggctgcggcacggatggcaaccgataagcggcagcaaaaccgccaacactggccaaaacattgtcattggctgtttctttggctaacgtcgcaatacgttttacggctgcatcgccggcttcaatatcgacgccggcatccttataatctttcatgcgctaacctccgctacattaactttgagtgatgcgacttccttatttaacgccggtgcataatcatcaagagcagttggatatttgcctgtaaagtaggcgacacataaaccgccattaggggccgtcgttggcaatccgacgctgtcttccaatccttgtgtcgaaagaaagcctagcgattcgacatccagtaaatcgcgcatttccggcacgctatgattagccgcaaataattcactagttgtctgaaaatcaatcccataaaagcaaggaaagcgcaacggcgggctggcaattcgcaaatgcacttcagcggcgccggcttctttcaacaatttaacgatttgcttagaagtcgtgccgcgaacaatcgagtcatcaactaacacaatgcgttttccggcaacaaccggtttgatcacgctgagtttcattttgacgcttttttcgcgtaacgcctgcgtgggttggataaatgtccgagcaacgtactgactcttcaccaagcccatttcataaggaattccgctggctttggcataaccaatcgctgctgacagggatgagttgggcaccccaacgacaatatccgcatctgccggctgttcctttgccaatcgctcacccatccgcacccgcgcctggtgaacattgatgccgtggatgtctgaatccggacgggcaaaatagatatactccatcgagcaaaccgctaacgatgtgttggtggtgaagtgatccaaatgcaagccatcgtcatcaatcgtaatcagctcaccgggttggacgtcacggacaaaatcagcccctactgcatccaacgccgcggtttcgctgcaaacaatatagccgccatctggcatgaccccaaccaccattggccggaaaccatgcggatcaaccgctgcgtataagccatgctcggttaacaagacaaaggcgaacccgccgtgaacttcattcagtgcctttttaagttgaaccagccacggttggccaacctgacgccgaatcaaatgcattaaaacctcagtgtccgaggtggattggaaaatcgcaccttgactttctaactcacgccgcaaactgatggcgttggttaaattgccgttatgcgccaatgcaatggcttcatcggaaaaccgaaaaagcaatggctgtatattttccaagacccggccgcccgctgtcgagtagcgcacgtgacccaaagccgcccgccccaccaacggtgtcaattgatcggtattggtgaacacttcactaagcaagcccagaccataatggcgccgcatgccatctttagttaagccgacaattccggccccttcttgcccgcgatgttgcaacgtatgcaagcccagatgggtaatgctcgcagcattgggattgccccaaataccaaaaacaccgcattcttcatttaagccttttggttcagatagcatgggagtgcctcctcaaatgcagtttgcaattcttcaagcggaaccgaaaattgatgactaaccgtggtgacgtcaaattgcggggctgcttgtacccgcccgattaactcagccggtccattcagcgcctcaaacgctgcttgatcttcgggagcaacggtgactaagaagcgcccttgagtctcggaaaagccccaactcgtcggcaaatctaccttaacttgcgcgcccagctggttcgtaaagcccatttcagccaacgccactaacaagccaccatcgcttaaatcgtgggctgctgtcacaaggtgttgccgaatcgctgttaatacaaattgctgattggacttttccgcatcgagatcaaagtcgaataaccgcccggcaacttcaccggtttgcaatttctgtaattcgctgccattgaaatcgccgtgggtttcgccgacaagataaagcaaatcatccgcatgtttgaaattcgccgtggtaatagtgctgagatcttcaatcagccccaccatcccaatcatcggcgttggatagattgctttgccattagtctcgttataaagcgaaacatttccggaaatcaccggcgcgttaaacgccttagtcgcagcaatgatgcctttagcagcttcggcaagttcataaaacgcttccggcttggtcggatccccaaaattcaggcaatcggtaatccctaaaggttccgcaccgctggccgtcagattgcgcgccgcttcggcaacactcatggccgcaccgatttttggatccaaatacagataacggcccttgctatcggtggtcatggcaagagcgcgatgggtcccgcgaatgcgaatcaccgcagcatcgctaccaggcaagacaaccgtattcgtttggacttgtgcatcataacgccgatacaatgaggacttatccgcaatcgtcggcgtgcccatcatggctttccaagtcgccaccggatcggtcacgatcgggtcaaaatcaggtgccggttcagctaagcgcgctggcattttgccgacttgctcataaatcggtgcatcatcagtcaatgaactgaccggaacatcgcaaaccaatttgccgtgatgataaagccgatattgatggccttcaatcacatgtcccacaactgcagcgtccaaatcatacgctgcaaacacatcaaggacttcctgttcaaaaccggcccgcacacacagcaacatccgttcctgtgattctgataacatgatttcaaatggtgtcatattggcttcacgctgcggaattaagtcaagatccatttccataccgctattcgccttgccagccatttcaacgctggaagacactaaaccagccgcgcccatgtcctgaataccgactagtgcctgctgatgatcttgcgtaatttccaggcacgcatccatcaacagtttctccatgaatgggtcgcctacctgaaccgccgaacgatcagccgcctcttcatcggaaaaatcaccggatgcgaaactggcaccattgataccatcacgtccggttttggcaccgacataaatcagcgcattaccgactcccgccgctttgcctttttggatctgatccttatccataatgccgacacacatcgcattgaccagtggattgcgggcataggtatgatcaaaattggtttctccgccgaccgtgggaatgccgattgcgttcccatagccaccgataccggccacgatgcgatcaactaaatgctgcgtgtgcgggagattgagatcaccaaaggccaatgaatccagcatggcaaccggcttagccccaatcgagaaaatgtcgcgaataatgccgccaacacccgtcgccgcgccttcataaggttcaaccgcggacggatggttatgactttcggctttgaataccactgccttgccttcgccgatatcaattacaccggcaccttcgccaggtcccatcaaaacgcggtcatttttggtccagaactggcgcaaaatcggcttactgtatttatacgcacagtgttcactccacatgccgcttgctaatccgatttcggtatcatttggctgatgaccaatcaactcagcaaaccggtgatactcatcttccgtcaatcccaaagccaaatacggtttcttttcagcgatggcttctggactcatctcaacgtgcgtcacggacctggacccctttcgtttgttgcatcaatgacttgaaaacgcctaggccatccgtaccgccaagtaatgcttcaacggcgcgttccggatgcggcatcatgcctaaaacattaccggcttcgttcgtcaccccggcaatatcatgaagactgccgttgggattgtcagcataccggaaaacgacctgaccattggcttccaaagctgccagtgtcttgggatcggcgtaataatttccttcaccatgcgcaatcggcaatgtcagttgttcaccaacctgatattgattggaaaatgctgtatccgcgcgatcgacaagcaacgtcaccggttcgcaaatgaaattcaaatcccgattccattgcaaagcccctggcaacagacccgcttcggtcagaatctgaaagccattacaaatgcccagcacatagccgcctgcttcggcaaaagctttcaacgccgtcatcactggcgaaaaccgggcaatcgcaccgctacgtaaatagtcgccgtaagaaaaaccacctggcaccatcaccacatcataacgacttaaatcggtttgactcggcttgatcagctcacactcagcaccggcaatggtctgaacggcccactgtaaatccaagtcacaattagatccgggaaaagaaataacggccgctttcatgcctcatcctccgtaatgggttctaattcaaagcgataagtttccatgttgacattggcaagcaactgatcgcaaatcgtgtcgacttgcttttctaccgcttctttggtaccagttagctttaattcaaagtatttgccgtataacacgtcgtctacattgtgataatccatgcgggttaaagcagtcttgataacttctgcctttgggtctaatacagagggtttgtacgtcacataaactttagctttaaacatgagccgctcctttttcttgtaacctggcaagcacttcttcataaacaggggttaagggaccgcgcgcttggcggaaaacatctttatcaagcgaatcaccggtcttttgatcaactagacggaaattatccggcgacaattcatcggctaagaccaaagtaccatccgttaacgtgccatattcaagtttaaaatcaaccaacgtgatcccgacttcatcaaaacgcttggtcagataagcattcacgcgatcagtcaaagcccgaacttgtttgagctgttccggggtcgcttcgtgtaaagcaaaaatttgggcttcgttcatgaacggatcgcctaattcatccgacttgtaataatattcatgaattggcggatcaagcttcatcatcggcttgacattgaacttggtcacaaaatgtccggacgcgtaattgcgcaccacgacttctaacggcagcatggtcgcctttttaacaatcatggtggtggcatcgggagaatcaatataatgcgtaggaattccggctgctgtcaattctttaaacaacaaggtcgagatggcgcgattcaattcacctttgtgggcaatctgcgcctttttctcgccgtttaatgctgtggcctgattcgtatacgtcatccataaaacatcc

SEQ ID NO: 48 - DNA, 1415 bp, LACTOBACILLUS RHAMNOSUS
ggttgttgcttttgtcaatgatcgagggtcagtcttgcaatttggttcgcccagcgagattgatggcgttgttcggcaaaagtctgaacgggtatactattttgactttgaaaatgaacctaagggcattgtgatgaatgatggcgcgctgacttatcccaactatcgcgataatccgtctacccccaataagcaaaaaggcattttctcttatggacgcccagacggctatgacaatgcgattgcttaccccaacacggaacgtaatccctctaactattggagcggaccatcaatgagcggcaaacttgctgctaattctaatggcaaacagaatggcaactttgaatggcgtaatctaatccgctttgccaccatgacaaattgggctggacgagttgaattcaatctccatgccgctgttttatacgggcgtaatacgcatcataaaactgaagcgttgtttaaaacattgggccgtagcaagcaggcggcggtggcgctgaatccggcagtgaaggggattccctcaaccaaaggagtgatttcatgattgtgatcgttgactacgatacgggcaacacgttgaatgtcaaaaaagcgcttgattatctggctattgacaaccaactttcagctgatcctgccgtcattctggctgcagccggtttaatcctgccaggagtgggagcttttaaaaccgccatgtctgcattgacccaacgcgacctggttccggttatccgtcaatttgcggctaccggcaaacccttactcggcatttgcctgggaatgcaattgttattcgatcgcagctttgaattcggggaaacagcgggactgggcctcatccctggcacggtggtcgcaattccaccacgagcaggattcccgacaccgcacatggggtggaacaccaatacgatcacccaacctgatcctttcgcagccggatttgccaaccaggcgacttactttgtccactcgtattacgtccagacccaacccgcctacactttggcaaccaccgactacggtcaaccgctaacgagcatcgtccggcgccagaatattctggggacgcaatttcatccggaaaaaagcggtgcagtagggcttgccggattacagcgttttaaggagatgacgactgatgcaactctatccagcaattgatttattagccggtcaaagtgtcagactcactcaaggcgactaccgccaagtcagtctgactgccgacccgctgactcaggtgaaaaatttaaccgccactggtcttaaacacttgcatttagttgatctcgacggtgcccgatcccaacagccaatcaatcaagccgtcattagcacgattcggcaacacacacctgcttttatcgagctaggtggcggtattcgtaccttagctatca

SEQ ID NO: 49 - DNA, 1109 bp, LACTOBACILLUS RHAMNOSUS
gtaaagccgatcatggcgctttttttactgcactagaagcttatctggacgatgaactaggcaaactgtatgccactttgaatgatacattcgcggatacgctcaccttatccgtggacgatgccattgcacaggcgcatcaagccggtgccaaaattgacgaccctgcagctgaagaaattgccacgacaaattatctgtttaaagagctcgcgtcccgcggcttgtggctgcaatcaccggatatgacggaacctaacaccatcattgccaaattaaacttcggcaatcgccgcacctactactaacagcttaaaagcacctgctacattaatccgatgacaccaaaaggcagttgcggtatgattacagatcgtatcgcaactgcctttttggatgctttcttcaaatacagtttcagatgatgctattaaaatgaactaggccaaagcggctattgattggctttaggggcatattgcttgcctgcaaaccaaattggaatctcacgttgcgcactggcttcactatctgagctgtgaataacgttgcgaatcgtctgatcggcccattcccgaccaaagtccccccgaatcgtgcctggcgcagcatctccgggattcgtagcgcctgtcatcgttcgaacggcttcgatcacattaaacccgctgacaatcatcgccaccagcgggccactggtcatgaagcgttcaattttgggaaagaacggcttgtcaacaagtgctgcataatgctgatgtaattgggcggaggttgcctgtgtgacttttagtgcctcaatggtgaatccgcgtcgttctatgcgggtaatgacctcgccgatatgtccttgggcgacaccatcgggcttaaccaagactaaagtttgttcttctgccatgcatgtgcctcgattccttgaatattttcagtaaattcgttcatattcagtatacacgagtggtagctgatgaaaaaaggcagtttagctttagttaagtttatttttcccgcaaaatgaactgctattaccggcagtaagcatagatgtaccaatacttttttggaaaaatgctgaacttgctagcgtgcgcatgcgttttagtcgt

SEQ ID NO: 50 - DNA, 3705 bp, LACTOBACILLUS RHAMNOSUS
gtcgatagttgcaacgaatcgttttaaagatagtgattagctttgcttgcgtttacgcttgatgccaagaagacctagaccacccatgactaaagctcctaagaaagcaagtgcgggccgtggcgattcatttgtacttggcagcgtatctttagtggacgcttgactgcttgccccattactattggcgttttcggtccctgttggttgtgccggcgtttcttgcgtctgtttcttgtcgtcgccgccctttggattggttgatggtgtgtcttttggttgattttccttgtcagtgccagagcctttcccggcatcagaaccgcttccgctaccagatcccttaccagtatcagagccacttccgctgccagaccctttacctgcttcggaaccacttccgctgccagaccctttgcctgtgtcagggccacttccgctgccagaccctttgcctgtgtcagagccacttccgctgccagaccctttacctgcttcggaaccacttccagtgccggaacctttacctgcttcagagccgcttccgctaccagatcccttaccagtatcagaaccgcttccggatccgcctccaggttgctgtggtgtcttggcagctgcctcaaccgctgcggcaattttagtcttcaaaccaaacagaccttgcaattgtgcaatcttttcagtatccgtcttagccgctgtacctgcagcaatgacagcatcaacatcaccgtaccaggttttaccggtagtggtatctttggcattgccaactttgacaggcgttgccgctttaattgtttttgccaattgattcaatgcagcatctaataccttgttgaagttggtttcaatttgatcggcggtgctagttcctgctgtcgtttgcgcagcgacagcgtccagttcggcatttagcgttttaccggtgcttggatcggtttggccacctaaatcagttccaaacgcctctttggcagattgtatcttgtttagtagtgcagcttgttggtctgctggcagcttatcaactaactgattcactgcagtggtcagctgcgttgttgccgttgtgagtgtttcaatcgtcgcatcagctttagctaaagcagtctgcgccgatccgatagcggtattcaaagcattagttgtggcgtcagtatattgagcgctcgttgcttttgcctttgcttgagtaagcaaatcctgcagcgttgttttggccttttgtaactgagccggatcatccgtcttaatattcttaaccgcgtaatctactgccggcgattcgttaccgtataaatcaacggccttaaatttaaagtccgcgtttgccgatacgctcagtcccgttgtcggtaaatcttggtaagtcttgccgccatcagtactgtattgaacggtctcacctgctgctgccttggctgtcagcgtcacttctttagctggatcagtcgtatttggcgtaattgttggtgctgcgagtgtcttcttaggctcataataaaccgtaatctttttagttgtgacgttactgccgctatctgttgccgcaacagttaagacgttcttgccctctaatagtttcaccgtctgatctattgccatatgacccggctgcccgctgtttaagttaatgtcctcatattgactggcaacctgactaccgttaattgccagttccaaataattaacgttatctgtcgctgttccggtgatacggaaattcggatcattcgtatagacaggtttgtccgttgagctatcgagtgacagtgtcggggcaacagcatctaaaataaaggtcaagctgtcttgaaccgttttatcttgcgtggtatcaccgattacaacgccaaacggtttctgaccggctgttcccagattcaacttaaaactaaaagttagatcatcattaatcggtacttgtttaccatctacttgcaaagtcgttgtcggatgcttgactttaccggtaatcgttgcaatcccggtcttagggtcatagtacttagcatctttaactttcagttgatttgccccgaaagtgacgccttggtcgaaggtcaccgcattttttaggacatcggcatcataagttgagtttaccttctgctgcttggtaacggtattgccatcttcatcttctgccgtcaccgtaatggtattatccccatagttaacgggtacatcgccactaaagtgatgtttggcatccaaagtaaccggtgttgtcgtgccaccgttagtaaccgttaccttcttagtgtcggcactagctgttccggttactttaacggtactttcggacgtttgatcttgattatcattaacccgcaagtcactaaaagtaggtgccgccaaccggacattcgtatcaaaatgcttaactaactgggtatgtgcttggtcagtataaagatcaaccttcgtcgcatagtcgctagcgtcaagtgccatagtggctttgaaactattggcatcagcgtcataagtggtcgtcaaatcatgctgctttccttgcgcatcggtataggtaccataaacagcagctggatacgtcccggtaaaggtgtaagtgccaccttgcttccctgcttgatagttagccgtttgactcgtgattttatctggtaaaccaccaccattaataatcagatcataagcagttgatccgggcttttgtgcggaagctgattgatccgtggcgtttgaggcgttatcggtcaaataaagttcaacattattatcgccttgacccaacgcttgagcctgcttatccgtcagtggcgtttcgagttttgtgtagccatcagcagttgtccctgtcgtcgtaaaggtgccatcaagattggtgacttgattaaccgatgtttttgcactcttagtggcatccaaaccgcttcgatcatcttttgcttcagcagtgagatagtaagtggttttgcctttttcctgcctagacgttaaagcaacatgacgaaccgttggcgccttagagtccagtgtgaatgctacatcgtatgtctgccgcttgtcgccgccttcaggaacacctgaaatacgatacgtgtaattgccatccgcggctgttttgatgttgccatctcgttgatcataatacgtgccatcccaggccggtgcgcggtaataagtatagttgcgaccagttgaatcataataagtcttagtctggttattcgagctgctgagtgttgttactttgttgccgtgattatccagcacatcgacttgcacgtcgctaatattgcgtaacaggtagtattgcatgctgatgtcgttataaagtgcgttcttatcgctcgaaaaggccactgctttatcatcaaccgtttgcttgccactggcatccgtgactaagccgccgtaatattgactgccggttttcttattggtgagcatcggaacagtcccataattgccaccagttggatcgtaagtcacaccattcagactatccacgatcttcccgtcattccaatcaccaaagaagcccatatatggcaagttgagactcgagccatcatttcccttgaagttcaagaacccttcaacaaactgttgctgatcaaaagtcttaggcagtgaaagcgtgaacggtacctgcacggattttccagccggtaccacaatatcggtatccggcttgactgccgcatcagtaattttcttgtcatagag

SEQ ID NO: 51 - DNA, 1176 bp, LACTOBACILLUS RHAMNOSUS
gtgcatttagcaaaaagaatcctcaacgtcgcaccgtcagcgacattggccttaagtaatcagacgaaagacttaaaggcaaaaggtgccgacgtcattgatttgtctattggccaaccagatttttcaacccctaaggcgattgatgacgcagctattgcggcgattcaggctggtaatgccagtttctatacggcagcaaccggtattccggaattaaagcaggcgattagtgaccggatatttgcccaagacggtattcgttatgatcatcgtcaaatcgttgcaaccaccggcgctaagtttgctttgtatgccttatttcaggttttcttaaacccaggcgatgaggtgctgattcctgttccatactgggtttcctacgaggaacagattaaattggcgagcggcgtgccacatctggtcatgccggcagtcggacataaagtcagtgtcgatgatcttgaggcggctcggaccgataaaacccgggcattgattatcaattcgccacaaaacccaagtggcgttgtctatgatcgcacggaactgaccttaattggcaattgggcgctgaagcatcatattttggtagtgactgacgatatttaccgagatctgatttataacggtacgacttacacctcaatgattagtatcgatcccgatatcgcagcgaatactgttttaatttccggcgtctccaagtcatatgcgatgacgggttggcggattggttatgcggccggtccggaaaagctgattcaggccatggcgacctttattagccacacgacctctaatccggcagcagtttccgaatacgccgcggtggcagctttaactggcgatcagcaggttgttgaaaagatgcgccgtgcttttgaagaacggctgaatcttttctatgatcttctggcagatattcccggtttcgatatgggagataaaccgcaaggcgccttctatcttttcccgaatattaagcgtgccgctcaattgagtcattatggtacggttgatgattttatcagtgcactgttgaccgaaaccggggttgccattgttcctggacgggcgtttggcatgccggatcatgcgcggattagttattgtaaagatttggccagtctgaaagaggccgcccggcgtatccgggagtttgttggtaaataa

SEQ ID NO: 52 - DNA, 2901 bp, LACTOBACILLUS RHAMNOSUS
tttgcgatggcgaaggatccttgatggttggttgatgcccccgaatcagttccgctatcagaaccgttaactcggactgaatgatcgtatccgaaaacgcgcgcgggcggaaatattcttcaatgatgcgctcaagtgtgatttgaatgtcatgaaaaccattgcgaaacagaacataccgctgcttggttttttgcttacgtaaatgattaatcatgaaatcataaagcacactttgctgactttgaatctggttgaggaaatcgatagaaatattgcgatcgcgaaacaaaatgttgatcagcaaatcgttgtcgcctaacgcatcaatggaatgctcacttccaatatccagtagcagcacgtcgccttgtgacaggtggacgcgctgaccgttaaccgtttcatcagcgtgtccttgcaacatatagttcatctcaaagaactgatgggtgtgcaaaggataaggggcatatcgattatgtttgctgacataaatggcgtgattgcggaaaaaataatcgtttaaaaccgggacgttagccgtttttgattcccgcaagtcaatcgcggttggcggaatgtcatcgctaaaaacatgatgctctttctgctttttttcgacatcagtcaaactttgcaactgctttaaaattgctaattccatggcaccctcctgtgcttatgttccgatcataatatttatctgacattgtgaccataacatgtaagcggttaaatgtgaactgtaaacggtgacaaaaaatgaaatgtgcaggaggtaacacaatggcttcagagaaaagctcgttgaaatccaccattcgtgtttcaatcacaaattttctggattcaggcagtattgttgccggtgctagcggcttgacactgtggacgcagcattttggactcagcagttttcaagtcggcttattacgcgccttgtcagccaacgcatttggcgcagcgcttggtgctctcatcggtgggccactgtctgataagtttggtcgtaagttgatttacacctatgacatgttggtttatatggtgggcacgatcctggtcatgtttgcccttaacttcccaatgttactggcaggatttctcgtaactggcttagcagtcggcgccggtgttcctgcaagttggacttatatttccgaaacgtcacaagatgacaatcgagcaaagaatattggtgtatcacagtttgcatggtcattgggaccggcagttattttcattctcgggaccgttcttgcaccacttggtctgtttggtaaccggatattgttcggattgctgactgtgattgccttcattgcttggctcttgcaacgtggacttggtgaatcaaaagcatggcaggatcaaaaggcgtttgaaaagagctccggtgaaaagtcgcatccttatcgcaccttgttctcgaataaaacctcacttaaatggctatgcttcctagtcggtgtttacatgttctggaacttggtagccggcgcgatgggcttcttcatgccatatgtttatgaaactgctggcggtctgtccaatcaggaagccaacttactgcaggccgtgctttgggtcctcaccgccttggcaacatattttggatttgccaagtacggcgacaaagcgaaccatcgaattttcttcttcgttggcgccgcaatggccgcagcatcttggatcgtattgacctacgccggcatggctcagtcatggagcttatgggcgttcgtagcattgtggggaattagcgcaggaatcggtgcccaagcatggtatgcattatgggcaaccgaactcttcccgacccaattccgcgctggctcacaaggcgtgatgttcttcctggttcgtgccagtgccggtgtttggtccattattttcccggcaattctcaacagcctcggcttcaccgttgccggaactttcatgatcggactgctattagtatcacttgtcattggcacgatctggacgcctaagacgcgtggcaagagtcttgaagaaatcacccgcgaacaatatggggacaagttcttaactgacgatgaaaagagcaaagccgaccgcgacacagcagcaaaagacaccggcagcgagcgcgtttcaccgcagtcaattaattaaccaaacgaatggtgttaaagagaggtgcagcatatgaaagcatacgtagcagttgatatcggcgcatcaagcgggcggctcatgctgggtgcaattgtcgatggtcaactgaaactaactgaagttcatcgattcaaaaacggcttcaaaaacgaagcagggcatgatcggtggcaaatcgaccatatcattgatgaaattttcgccggcttggaaaaagtcaaaaagatgggctataccgcagtggacttaggaattgacacttgggccgttgactatgtccttgtcggtaatgatggcaagaaaatgcacgatcctgttagctatcgagatgcacgcacgaatcaggcagtacggcaactgacatctgagcttccaaaatcctacatttatgaaaaaaccggcatccagttccaggacttcaacacactttatcaactttacactgaagagcgcgatgatcttgctaaagccgataagattctgatgatcccggactacattggttatgtcctgaccggcaatgccgtcaccgaggtaaccaacgcctcaaccacgcaaatgctcaatctgcggcagggactttttgataaagacttactcaaagaagtcaatgttgctcaggatcagttcccggcattggttgaatccggtacgccgcttggcaagatcagtcataaatggcatgtgaaatacgatattccggaaaccgatgtcattaccgtcgccacgcatgacactgcgagtgcggttgttggt

SEQ ID NO: 53 - DNA, 6669 bp, LACTOBACILLUS RHAMNOSUS
gtgccgactacctggtttcaaaacagcgtctaagtaatgatagagttccgatggcgcgtaatgcagcggcttaactagatcggttgtgatcttgaagtctggcgcatcatcggccatttcttcattgacctgtacttgggtaagtccttgatataatttcaaaataggcacctctcatctttattttctattatagcatgtatagcatgctcaacgttgcgcgattcgctcaagtgctttttgaaattctgcctgcgccaaagctgtggtttcttttgcttgcgctttctccaggaatgttgtcaattcagcatttggggttgcggcaagctcgcttacagcccatgcggcagtcgcgcgaatcatggggcggggatcggtatcgatcacctcaagcaaatgagggacggcactgcgatcgtggagattgacaagagcaatgatcgcattacgttgcaaaggctttttcccccgccaggcaccggcaagcttcccgaatcggtttttgaatcctttattgcttagcgtcagcatcgggatcaattctggcatgacagtatccgggtcaggctccatttcaggatgaacgtgaaaatctttgcctttgttgaacgggcacacttgctgacaaatatcacagccgtataaaacattgcgaatcattggccgaaattccgggtccataaacccctttgtctgtgtctgataagataagcaacgttgtccgttcattcgaccgtcgccgagtaaagcatgcggtggacaaaagtcgatacagcgggtgcatgtgccgcattgacatgacatgggttcatcaggggcaaatttaatattggttatgatttcgcctaaatagacataggaaccgaactcgggtgtaattaataaaccatttttaccgataaaacctagccctgctcgttgggcaactgccacatcaattagttcgccggtatcgaccatgggtttaaagcggatatcagtctgtgacttggcggtttttttaataaagcgaatgagtgctgccattttccggtcgagaaccgtgtgataatcaattccccagctagcacgggcaaagcgcccacgtttgggaccggttcgcggtggtcggtcatgaattttcgagggataagcaagcgcaatggcgataatactttgcggttggtcgaaaattttatccggataaagccgctcgtccagattctggtgttcaaagccagttgtgtggccggcagctttttgtgccaaaagacttggttttaatgcagcaaagttatcggctgtcgtaaacccgattttgtcaatacccagatctggctgctaagttgcagtcaggcaatcctgtggggaagccggcaaataagaaataggcattgtatttttagccataataagagctcgagcagaatcggttatgaggatgctcgggttctttttgtgcgttgagcgctatgccgggtagtacaggatgatattaaagaaatcctttttttaaaatggcaaagcattatcaaccgagcaagtgctttcattttttgcattacttacatataattaactatgtaatataaaaagtattataataatttctgaataaggatcaaagaggcagtcaggactattcgccggtggctggtgaacaaatcacgaataataccgacactttaaactggcaaaatatccaggcggcggcagggacattgtattatcagttagaagttgaatttgatagcggccaaaagtcttattggtacagtaacatcgccccactaaccatcaccgcctccgctccgcagctgcacgcggttcctaatctgcagtttgcgcttagttcgggcgctaacccaagcattgccgatttttatgccgcacagggtgtgaccatggtgtatcagccgagcacaatcgctaaccagacaaactgggatggtaacaatcatggtgcgttggcgattgctggcggcggtagtacctggagtttgaatgttcagttttcaccgtttaaaaatcagacaacgcagcactatttatcaacggagactggtggcagtgcggccgtgaccttgcattttgctgatgggaccgcggctcaggccaaagatgaccgccagccggtgacggtttatagtaaagtgaccaaggatgttactacgacaaccgctaccacgacttcgctgcaggtgccacaaacgtcaacgattcaaccgggaacgtatcagtctaccgccacttggacgctggtcaaggcaccttaatcgtgtgaatctaaaaaacaaccccgcacttcgctatcattgcgagaatgtggggttatttttgcgcagcggcaggcttatgcgtcagattctgatagcccgttttgccggatgacttgctgataccaataaaatgattgcttccggtagcggtttaacgtaccgctgccatcatcatgtttgtcaacgtagatatagccgtagcgtttggccatttcgccagtgctggcggagattaaatcaatcggcgcccatgaggtgtagccgattagatccacgccgtcttgaatggcgtcatacatggcagcaatgtgtgcgcgaagatagttgatgcgtgccgtgtcattaacggttttttggccatcttgttcaatcaattcgtcacgcgcaccgaagccattttcgacgaccatcaccggcacttggtagcgatcgtaaatttgattaagcgccgtgcgtaacccgcgaggatcgatttcccagccccagtcattgcgctggaggtacgggttcttgacgccagcaaaaaaattaccgccgctggtttcgccgctttcagtggtggtcatagtgctggattggtaataagacaaagcaaagaagtccacggtgcctcttttaaggatctcttcttcccacggctctatgtcgatggtgatatcgtgatcgcgccaataacgtttggcaaaatagggatagcgacctttcacttggacatcgccgcaataaaaattattgagttcggtggcagtttggacaagggcaatatcttctgggtgactcgtcagcggatagagcatacgataagccagcatacaaccaattttcaggtttggatcgaacccatgggcaaagctgcagactctggcactggccacaaattgatgatgcagtgcttggaggcgcatttgggtggaatcgatatcagggctgatgaaccggttggtgtcgtccacatacatgccgccagctaagtaggctcccatcggtcgggttagcatattgatttcattaaaggtcagccagtagtggacatcattgtgaaagttggcaatgatcgtttgcgcaaatgtaacatattcttcgatcatgtctcgtgacgcccagccattgaacgccttcgtcagtgcaattggcgattcaaaatgcgagatcgtaacaagtggctcaatgttgtagcgcttgagttcagcaatcaacgccgcgtaaaaggcaagcccttctttgcttgggccgtcgcttgcagaaccgtttgggtaaattctcgtccaggcgatggagaagcgatagactttaaagcccatttccgcaaacagcgcaatgtcttcttgataacgatgaaaatggtcaatcgcttcatggctgggataaaacgcgtctggacgtacctcgcgcgtgagttgacgggggacattgtgagtgccacccagtaacaagtcgctggtcgacaaccctttgccgtccacgttatacgcgccttcaagttgattggcagcagttgcgccaccccagagaaagttctcgggaaattgacgaatggacataacgacctccttcattaggtttcggggatgaaactgaatagtttatcgcctgggcagacagatgttttttcatgcacttcaatccgttcgggaggcgtattcggtagcaaaacaatcaccgtgggatcaaagccagacttttcaatcagcggcaagtcgattttaatgagcggttggccgactttgacggattcaccttgggagacaagaggtttgaaaaagcgtccatccagtcgcacggtgtcaatgccgatgtggatcagcacctcttgtcccgaggctgtggttaagccgattgcgtggttcgttggatataacatggagacagtggcatcggccggtgcaacaatggtgccgctttcaggaataatggcgactccgtgtcccagcgtgccagctgcaaaaacctcatcctggacgcgagcaagcgggatcatctcaccggcgaccacactctgaaaaggttgcggttgcgttttagcgctggtgcttgcattggtctcgacggtggcaaagaagtaggttgaaagaaaagttgcgccaaatgcgatggccacagtcagtaaggcattgcggaaattatcaggattggcgccgatgaagacagggagggtgaagatcccccggggaaccgaatgaatagcggaccaccccggtgagcccggcaaaaagacccagccagtcccccggaaaccacgacgcaggttaaggcgtgtttatacttgagcgtgacgccgtacagtgccggttccgtgatgccggataacgcggtgacgctggcaaagagcgcgatttggcgtccgcgggtttgcttttcacgcacggcaatggcagcagcggctccggcttgggcaatattgctggctaacatgccgggacccataatcgtttcactaccaaacttggtcatggacaaggtcgctaatggcaagagtgaaacatgcatgccaaccatgaccagcagtggggtgaaggcgccgaccagggttggaacgagccatggcgtatgttgattaatgaaggtgacagcggtataaaggccatcgcctaaaagactgccgatgggaccgatgacaattaaggcaatcggagcggtaatgagtgcgactaacagcggtttgagcatggttttgatcatgttgggtgcggctttttccgcgaatcgttcgatatagctcatgaaccagacgattaaaatgatgggaatgacgcttccaccataggatgctaggcgaatgggcgcaccgaataacgcaatcggcttgcctgctgctaccagcgctgtgaagttagggtgaagtagcacaccggccatcatcattgccagataggtattggtgttgaacttcttggcggcgctgacggcgagcatgaatggcaggaaataaaatgcggcatcagccatgaaactcaaggtgagataggcagtgctttttggatcgaggcccagtaaagctaagatggcaatgacaactttgaacatcccgccggcaatgagaacggtgatgatcggggccatgatgctgacgatggcgttaagaatacgtttaactaaatttttttcttgggcttgtgtcggttgattcggttcgcctgcttcatgaagctggtattgctgttggatagcggcgtagtatttggtcacgttagcaccgatgacgacttgagactcatcgccggccaccacggtactaagaacttccggcattttttcgagttgtgcctgattgaattgctgcttatcgcgtaaagtgaagcggaggcgagtggcgcagtgggtgaggcttttgacattttggatcccacctacagcagccatgatttgggtggcgatcttggctggatcagacatggccaaggcacctccttaacgccacggtcattttgccgcgtttgatttgatgcctgagtcttttatccaatcggttgctcgtgcgacagtcatgcttttgtacttgcaatatgaataacccccttcaaaaataaaccctgttattggcagtaaaaaaacagacatagccaagaagatcgtttgaacgataaaacgatgatcaaagttctgtctgtttacccggtaacagtagatgtgatatcagctgttaagcgtatgataacggataccaaaataaaaagcaacctaattagattgctttttgcattatttgtatccaactatttattatttatctaaaaataaatgataaatagcaagctaaattaaattgtacataaaattaaaatgaatactaacatgttcatgcctaataatctcagcggcgaatgtttagtcaaactgttacggctaacgacttttaggctggctgccagtcatcatacgcttgcgaaaacgcgggtgatattcatagagaatgagggctgcgaggcccgatcagccccatgatggtgaccagccaaccaagcggtatccccgggggtgtggtaagtgagggtaaaggtagtggcttttttagggactttaatccccaatgaaaccgcgataattttgaattttcacggactgggtatctgctttgcagccttttttgtaagggatggtgagcatgatgtaaccacttgttgtttttcttgcgtggtttaacgaatagacgggcccgtttttggaatgggttttggcttaaaggtgccgtttgggctttttgggcggggtttttaaaaccggtttttgcttttgaaaagggctttggggccgggtttaaaaggggttggtacccaaagcgcccaaaaaagtggaatatccaaagggtccggatatttttggggttttggaaaaacccccccgaattttgaaaagggttcaaaaggggttggaaccggggtgggggtccgcggtttttttccggtgggga

SEQ ID NO: 54 - DNA, 9731 bp, LACTOBACILLUS RHAMNOSUS
gttgctgcaattgccataagctcacacccttctttgacatgctttaagcgtagcggatgggctataccatgtcaatcaactggaccgctgaatttaaaaatgaatcaaatatttaaaaatcatcaacaggtatagccagaaaaacagccgacaaatgagataaaacgtctcacttgccggctgtcagtttccgaaaaatcagctttctatgatgaggtttccctaccattcataactgcaactttttgagcttaagaatcttgatctcaacgcctaatgtgacgctttctttttggcgaaccacaatcctgagaacagactcaacaaagcgcctaggaccaccatccacagagattgttgctcccctgttttcggaaggttgccttctgatgaggtgataacttttgttttaggtgctgcaggcgtctcaggtgccttagtcgttggcagaggtgttgctttggtgaccttttgtcccttgccggcacgatgttggtcgttaattgccttaatgccagctactttggcttggttcaccgcatcagcgttaccagctgcgtcaatcgctttctttgctttatcagcttctgcggcaactgcttgcttttgcgctgccttttctgcatcagtcaatgttggatcttgatcaattgccttgatgactttagcagcttcgtcgtcaattgcctttttggccgcatctttttgcgccgcgatggtttgaccggagcggtgctgggcatcaattgccttgataccagctgctttggctttgtctactgcatcggcaccttttgccgcatcaatggcttttttcgctttgtcagcttctgttgcaactgcttgcttttgcgccgttttttctgcgtcagtcaatgttgggatcttgatcaattgccttgatgactttagcagcttcttcatcaatggctttcttagcgtcatctttacgggttgcaactgcttgtcctgactggtgttgcgcatcaattgccttgataccggcgtctttggctttatcgactgcatcggcactgccagctgcatcaatcgctttcttcgctttgtcagcttctgttacaacgccttgtttctgagccttcttttcagcatcagtcaatgacgaatcatgatcaattgcttcggtcactttagcagcttcgtcgtcaatcgctttctttgcatcgtctttacgtgttgcaactgcttgtcctgactgatgttgcgcatcaatggccttgatgcctgcatctttggcctgatcgactgcatcggcactgccagctgcatcaatcgctttcttcgctttaccggcttctgtcgtcactgcttctttttgctgtttcttggcagtagcggtcagagtcgggtcctgatcaatttcaccttgaactttggtagcttcagcatcaatcgctttcttggcttcgtccttgcttaagtcaaaagctttaccagagacgtgttgagcatcaatggccttaataccggcattttttgcttggtcaaccgctgaagcattagcagcagtatcaatcgccgctttggcctttgttgcttcgtctgcaacggcttgtttttgacgcttcttttctgttgccgtcagtgttggatcctgctcaatagcttggcctacctttgcagcttcggcatcaatggcttttttcgcagcagccttacgatcggtgagcgcttggccggactggtgctgcgcgtcaatgatctgaatgcctttggtcactgcttgatcaacgccatcagcattgtcggcagtatcaatcgcctgcttagctttcttggcctcgtcagcaacagcttgcttctgagtgcccttttcgctgtccgtcaacgttacatcatgatcaatggcttcgcttactttagcagcttcttcatcaatggctttcttagcagcatctttccggattgctagtgcttgcccggatttgtgttgctggtcgatcgccttgatgccagccttttgtgcctggtcaacggcatcagcatcaccggctgcatcaattgccttcttggccttgtcagcttcagcgatgacggcctgcttttgtgttgccttttcagcatcggtcagtgttgggtcatgatcgatcgcatcagttatcttagcaacttctccatcaatagctttcttagcgtcatctttacaagtatcgatgctttgtcctgacttgtgttgttcgtcaattgccttgataccagcagattttgcctgatcaatagcatccgcatttccagctgcatcaatcgcttttttagctttatcagcctcatcagcaactgcctgcttctgcgcttctttttgagcagccgtcaaagtggcttgttgatcaattgcatcagtaacttaccggcttcagcatcaatggcctttttggcatcttcttttcgagcatcaactgtttgtcctgacttgtgttgctcatcgatagcccttgatgcccggctgtttttgcttgatctacagcatccgcatcgcctgcagcgtcaattgcttttttagctttatcggcttcagttgctaccgcttgcttttgtgcttctttttgggcagcggtcagagttggatcctggtcaatcgctttaatcaccttagccgcttcttcatcaatcgcttgcttagcgtcatcatgacggctatcaatggttttaccggctttgtgctgagcatcgatggcttgaatcccggctgtctttgcttgatctacagcatcggcatccccggcagcatcaatggcttgcttagctttgtcggcttctgtcgcaaccccttgtttctgggcagctttttgggctttggtcaacgtgttatcctgatcaatcgctgccgtcaccttggctgcttcagcatcaatgacctgcttggcatcggctttacgatcgtcaagagcttgcccggagtgatgttgggcgtcaatcgctttgatcccgtcagtcttggcctggtcgactgcatcagcctgcttagccgcatcaatcgcttttttggctttagttgcttcatccgtaaccgcctgtttctggcttgccttttcattcgcggttaaggtggcatcgtgatcaatagcagctgtttcttttgccgcttcggcatcaatggcagttttagcatcacgcttccgatctgcgagtgcctgactggattgatgctgagcgtcgattgctttgatcccatcactttcagcttgcttgataccatcagcattgccagctgcatcgataagctttttggctttgtctgcttcagcgatccaagcctgcttttggtcagctttttgcgttgccgttaacgtcacatcttgatcgatcgccttacttactttggccgcttcagcatcaatggcctgttttgcttgctgcttttgcttgtcaagtgccgttgcggactggtgttgcgcgtcaatagcttcaataccatcaattgttgcttgaatcaccgcatcggcgtcagaggcttggtcaatggccgcttttgctttcgttgcttcatctgccactgcctgcttttgtgtagccttttggtcggctgtcaaagtgacatcctgatcaattgcttcactaaccttggctgcttcggcatcaattgtttgtttggccgccgccttttgcttatccaatgctataccagtttggtattgggcatcgatggttttaatcccgtcagccagagcttggtcaatcgcatcggccactaacgtagcatcaatagcagctttagctttagtttccgcatctgtgactgcttgcttctgtgcctttttttcagcggcggttaaagttggatcttggtcaatcgctttggttacttttgcggcttcagcatcaatagcctgcttggcgtcattttggcgcgctttaattgcctgcccagactggtgctgagcgtcaatcgctttgatgccgtctgttttagctttgtcgacggcgtcagcattttgccctttgtcgatcgcttgcttcgcgttatcggcttcggttgcaactgcctgtttttgcgccgctttttctgtcgctgtgagggtttcatcttgatcaatgttgcccgttactttagccgcttcggcatcaatggcttgcttagcagcggctttacgatcggcaactgcttggccagcgtgatgttgggcgtcaatcgctctgatcccgtcattcttggcctggtcgactgcatcagcctgcttagccgcatcaatcgcttctttggctttagtcgcttcatcggcaaccgcctgtttttggcttgccttttcattcgcggttaaagttgcatcctgatcaatggcagctgtttcttttgccgcctcggcatcaatcgcctgtttggcatcacgcttccgatctgcgagtgcctgaccggattgatgctggtcataaattgctttaactcccgcatttttagcttgatcgaccgcgtcagcattgccagccgcatcaatggcttgattggctttagtgacttccacggtaatcgcctgtctttgcactgctttctgggtcgcagtcagcgtcacatcctgaccaatcgcagcctgcaccttatcagcggtttccgcaattagctttttggctgcttctttgcgttcgttcaacgccaacccggcttggtgttgggcatcaatcgccttgataccatccgctttggcttggtccaccgcatcggcattcttggcagcatcaatagcagccttagcttgcgttgctgcatcagcgactgcttgctgttgcgttagtttttccgcttgcgtcaaggtcacatctttggccaatagctgcaatgactttaactgcttccgcatcaatcgcctttttggcatcttgtttgcgagtgtctaaaagcgtgccgctttgatggacggcatcaatggcttggatgcctgatgctttagcctgatcaacggtgtccgcatttttagctgcgtcaatcgctgtcttggctttgactgcttcatccgtaactttttgcttctgagtggctttctcagcgctggttaacgtgacatcttggtcaatggcgtcattaattttagcagcttcggcatcaatggcttttttagcatcaactttgcgcgtatctaaaagtgcacctgattgatgcccatcgtcaatggcttgaatgcctgctttttcagcctgaataacaccatcggcatcctgcgctttggcgatggtatctttagccttggttgcttcagcagcaaaggtctgcttttgggccgccttttcttggctcgttaaagtaggatcttgatcaatcgcttcgccaactttggcagcttcagcgtcaatggccgcttgtgcatcagttttacgcttagctaaatccattcccagccgatgttgcgcatcgatggctttaatcccatctgcttgcgctttggcgatttcatcagcattccgcgccgaatcaattgcggtcttggctttagcagtttcatcggcaacgccttgcttttgcgcctttttttcagcactggtcaaagtcggatcttgctcaattgccgttaaaactttggcggcttccttgtcaattgcctgcttagccttggttttctgggtatctaaatctgcaccaatttgatgtttcgcatcaatggctttaatcccatcagcttgggcctgaagaatggcatctgcgttttgagcctggtcaatcgctgctttggctttagccgcttcgtcagctactgcctgcttctgggcgtccttttcggtactggttagcgtgtcatcttggttgatggcatcggttattttggccgcttcggcatcgatcgcttgtttagcactatctttgcgggtcgccaaatcggtacctgcctgatgttgggcatcaattgccttgatgccatcatctttcgcttggatcaccccatcaatggtcttcgcttgatcaatggcagtcttagctttggtcgcttcatcaccaacgccttgcttctgggccgtcttgtctttggccgtcagagtcgggtcttgatcaatagcatccttgactttggccgcttcggcatcaattgcgtctttagcttgagctttacgcgtatcgaagtcagcgccttgcttgtgttgggcatcaattgctttaatcccatcatctttagctttatcgatggcttcaatcgtttgggcctgatcaatcgccgtcttggctttcgcggcttcatcagcaactccttgcttttgggccgctttttcgctagtagctaaggttgaatcctgctcaatctcagcagtcactttagccgcttcggcatcaatcgcctgcttagcttcttctcggcgcacgttgagtccggttccaggctgatgttgggcatcgattgctgcaatgccggcatctcgcgcctgctgaacccctgtttcggtttgcgcttggtcgattgccgccttggccttggttgcttcggctgcaacgccatctttttgctttgccttttccgttgccgttaaagtcggatcctgctcaatttcagcgctgactttggcggcttcggcatcaatatctcgtttagcctgttccttatgcgcgtttaaaacgatttcctgaatgagcttgtcaaagtcctcgtcaaccgtgattgggtcgactttttctttaacttcttcttgaaccggtttaggatccttggccgtgtcatcaatcgcctttttcttcatggcttctaaaagtttgggttgagtgcaggaccaaaatcgttgtactcaagaatgcgagtggatcgaaatgctggatgaatagggtgtttcccttcaatccgattggtttccatccgaacagcaatccaatcctcgggcataatcttatgcgcctgcatgtagatgacggcatctgctcgtccacctagttgatgactaacgcttttaccatcactaccatcccagcgccgtgcaaattctctgttcttgttaagacttgtaataaccgctgggaccagcccatcaggtgaaatcacaacccgcttgatttttccttctaaggcatcgttaaacgaatacccaaactccaaataccgatccaagccatctgattcaagcgagccgaaccgaattggaattttgaaggtatccgtaccttcgtcatataccacggcgtcgttgctatattggaatgtgatgctatttataagcttcctatagctcgaaccatcggcaccacccaaatggatatcaccagcctggggcttattcgctgccaatacgacaccgcttgaatcccaaagaccaattgaaatcagtcccgtggctaatagtaatatcagtctcccctttttcacttcaacatgcctcccttttattgaacccaaaacagcaaacaattaagttaaccctacccattctcaaaatatttgatataaattattacattttgaaaggcgagttcttaataattgaaacaacaagcattatcactttataatttatggtgaaccaagcaatgcttatgcaatatgtcattagtataaataaatcaatgattggttctagttcaaagcatgcttaacgttaggcaagttttgatagtagcaacctacttgggaaggtaagtttatggaagaactattggaaagtagcctgctcaagcactacgaaatcattagttttctgcttgacaaggaatgggtgaccattaagcaggtggctgaagaaacccggatcccggcacgcaccatccgccaaaatattggtaccatcaatcaatatattgccccggcaaaaatcgaaagtagccaacgctatggaattcgattggcttatgactcagcccataatcccttatatatctatgcagctatttatcgtcagtcaacgcgttttttgatactagagcaaatttttctgcaccattatttatcaattgctcaattttccgaagcacttttcattagtgaatcaacattaaaacgacatatgcaagttttaaaccagattctaccgcactatggatttcatattgacacgcaaaccctagatattattggcgatgaaaagaaaatccactttttttattacacttatttactagagagatattggtttatcgatgattttctgccacaggatgaattaaaactaattgctgctatcatctcagagtttttcgcacattatccgacactgacaacccccagataccagtctttttcttttatcaacaagttacgcgcgacgatcttcgtttgcctcaaacgcaacagtcgcgggcacacgtttgaaaatgcgaccccggcaatcgaaaatgcaaccttctcgccagaactgcgccaatcaattgcacgctgctataagattgactgctcctcattagttttctcgcatctgttctatctcttttttaatcctcgaaatgcttggtcttacgccgatctgctcactaaaacacatcaggatgctgaaattcgcgcgatccatcgcgcacttacgcattttcttgacatggtcgttgcaactgaacatctatcgttaccaaatcgcgaacaagttctactgcgcttgtataacgccatcgaatatacgtggggtccgacaaaaatcctgtacagtccgagcgaagctttctttgcgagcatgaaccaatttagcaagacttttattcgtcaggccagacagacactggttactgcactgagaaatgaaaaagtcaacgttcgaattgatgatgctttcatcaccaaactgttatttactttggtgacatcaggggagacgctgccgctgcaattagagcaaaaagccccgaaagtccgaaccgggctcttcttcaatacgagttttgagcatagtcactttttgctgaatgaactcaattaccatttacgttcgaacctcaaactcgagcttgtcccggccagtaccttagcagagttaaaaaccgttgcccgccaatttgacctgatcattaccaatctccccttactcaatttgccaaattgccaggtggtcgccattcagcctcatcccacgccggaagacttcgataatattttggctgcttataatcggattattaatgccaaaagtctggaaagttccgtatcgtaagctcccaacgacttttcacggaaccgaacgcatacaaaaagccgtttgacaaaatcgctatgtcaaacggctttttgcttctgatcggtctgatgtcaatccgatatttatgaaatggaggagataggattcgaacctatgaacccgaaggagcggatttacagtccgccgcgtttagcctcttcgctactcctccatgcgattgatataaatcaactttaatagtgtacaaaaagaggttataaaaatcaaccattttcaggtagtttttataacctccgatacttaattttttgcttaatctgtcaaagctgcgggcacttccaatgtgactaatgtgtcgcgccattccgtcaaccagtctgtactttgccattcaaaaaggcgtttaagcccatagcccagcggttgatgataataagttgtcttgcctagcagcttaggggcatcgcgaaaatgctcatgaccaaacaccacggcactagcccgatttgtcaacagatcgcctagttttgccgatcatcatgattccccccatcatgccatgttaaactagcggcattgtaaccatgatgcgaggaaaaaacaattaaagtgacttggtgtgctaaatatcacccgttaccttcaaatcaaatcgccatcagtggctgatacgttattcagcggtcact

SEQ ID NO: 55 - DNA, 6422 bp, LACTOBACILLUS RHAMNOSUS
gttggcaaagcgttctggaaaaatctggtaccaaactgtctgtttaacccaatcaggcgttttaacccgatcaatcgcatgaaaatacggcatccgaaaatagttttccgccttatgtcgtgctgccgcgtgattttctcggacgccgcgatcaccatacaaccacacagcgccatcttggccggtaacttcaaataaatattgcaggcggcgataaggagcttcgagtgtcacctcccagtgatccctagtttgcccgtgacctatcaaatgcatcgaccggcgctgataaatcaacttattagtgccatctgcatcaggcagttgccaataaggatcgccatacagaaccgtcaccttcgcaacatcggcacgtgccgtgtgaaatcgcacacgcattgcctcatccgtatataagaaacaatcttcactttccgggcgatgcaacaaagcagctaagttcataatccgcccttctttcttcataagtaacaaaatcctgccaaaaaacggtatctatacagcgatcataccgccttcatatcaggcgctcaaacaattcgcatcagcgtgtttgccctccgcttaactgaatatcgtttaatgtcatttaggctacaatcataacagtctattggcggttcatcattagggcatcatacaaggcgtcagggcccgatgcgtcagagcccgatgaccttgatcattgaatggggctgccacgctcaggacaaaataaataggcatcagcgtcatctctgaccgctaatgcctatttgtgttacaccaacactcatctgccaaaaagccttcatgctagcgtaaattttattaataccgcgcttttaatgcccgctgaacctcacgctcttgatccttacgctttaaggtttcgcgcttatcatagttgtgcttaccttccgcaacgccgatcaacactttggcataaccatgtttaagatacatccgcaacggaaccaaagtaactccttggcgcgccgtcatttgaccgagcttgcgaatttcttttttatgcagcaacagtttacggttacgcatcggatcaacgttaaacaaattgccttctttgtaaggactgatatgcacattttcaagccaagcctcgttgttgcgaatacgggcaaagccatcacgcaaattgagcttgccatcgcgcacagatttaatctcggtacctgtcaaagcaatcccggcctcataggtatcaagaatgttgtaatcatgaccggcctttttattctgggcgagcaggttgtcaggtttttgtcgatgtttcttcgccattgaaccatcccctcgtatatttaaaagttgccagcgttatttagtcccgcgcttggcgttataatgtttaccttgatgaggcgcacctgctggcttatgtggtcgttgattattgggctgattacgattaccaccacgcccattgttcccgaagctcgggcgactgccatttgagcgtcgatcacggcgatcatcttttttaaccaacttgcctaaatcgctggaaagcgttttttcgtctggaatcaatgaaaagtcaacttgccgctgatcgatgtccacattgtctaacttcacgcgcaacgattgcccgattcgataagtccgcttggtgcgttcaccgactaaggccatttgactttcgacaaacgaatagtaatcatcgctcattcgtgtgatgtgaaccaagccttcaacggtgtttggcagtgccacaaacatcccgaagctcgtgacaccgctgacaacggcgtcaaattcttcgccaaccttatcagccatgtattcagctttcttcaggtcatcaacggcacgctcggcatcaatgctgcgacgttcggccatcgatgcttgggtcgcaatatcaggcagcttcttattccaagacgtcttcacgtcatcggtggtgccttccagagcgtaatcccgaatcaagcggtgcacaaccaagtcaggataacgccggatcgggcttgtgaagtgacaatagtattttgccgctaagccaaaatgccccagcggatctggtgagtaccgtgcctgtttcaagctccgcaataatttaacattgaccatggcttcttctggcgtgccagttacatcggttacaacatcttgcagttgtttaggagtgatctccttgccttttttcatcggtaccgtgatcccgaaactggcaatgaactccatgaattccttgacgcgatctgcatccggggtttcatgtacccgatagaggaatggtaaatgctgcttgttgtagtgctcagccacggtttcatttgctgccagcatgaaggattcaatcatgcgctctgagacgccgcgttcgcgcagcacaatgtcagttggatgacccatatcatccacaatgattttggcttcgttttcttcaaaatcaatggcaccgcgagcatgacgcattttatacaagatctgatgcaattcaaccatgtcttcaaacatgggtaccagttcttgatattcggccatgacttccgggtcgtgatcggtcacgattttattcacattgttgtaggtcatccgggcatgactcttgatcacactttgataaatctcgtggtttacgacatgaccatcatgatcgatttccatatcacatgacattgccaatcgatctacacctggatttaacgaacaaatgccattggatagtcgaaatggcagcattggaatgacgcgatcaaccaagtacgtactggtaccacgatcaaatgcttcttgatccaacgcagagccttccgtcacataatgcgaaacatcggcaatgtgaaccccaagatggaagtttccatttggtaatttccaaaccaccacggcatcgtcaaagtctttactgtcatccccgtcaatcgtgacaacagcctgatcggtaatatctttgcgaccaactcgttcttctggcgtaacgtgatcgggaatggcattggtctgatccatcacttcatccggaaattccgttttgatatggttttgcatgaccagcgacataatatcaacgccaggatcattcttgttgcctaacgtctcgacaacgatcccatacatcaacttgggatgatattcggttggaaattcagtaatctccgtcacggtcatatcgccgagttgcggaatattaccggtatctttaacataaaccggaaaattcttcagtttcttttcatgactaaccaccattccgataaatccagacttagcccgatctttatcggaaaatggtttgaattcaccaaccagtgtggttaaactgcgctgcacaatcttagtgatttcgccttcaggtccgcgactatcattgggacgggcttcacgaacgatccgcacttcaacggtatcgccatcaagcgcaaaatcggtgttcatcgccggtacataaacatcattgtccaagccctcaactgccacgaagccaaagcctttttcgttgccgcggaaagtgccggtcaagactttaggcgcgccgcccaatgcataacgtccttcgtgattggcgtgaatcaggttatcattttccataccgtttaacgcctggacgagtactttaaaatcgccgccttcacttaacttaagtgcgcgactgagtgtttgaaccgaataatcaatgttcggattcttacgaaatgttgctaatagttcattacgaatatggccaactgtggtcatgctatccctcgttttcttgttgcataaatgcgattacgtcttcttctaatgcgtgatgggccgagttaacggtaatgacatgcttggcatcatcataccaatgaaaatcaacgcgtgcagcattgattaaggcatcgcgtaattgatacgctaatcgaccatcaactaattcatcctgaccggcttgtccaataaaagtcggctgtttgactaaatttaaatcagcagcaaccgtcgtggcaaactgatcgattgcggccaactgtcccggcaaatatgccagaatctgtgtgctttcatctgatttgcctgctaaccgattcatatactcggcatactttaaaaaacccggtactaagtgatgtttgcccggcaaaatcggggatgaaaaaacaccgcctgctgtaatccctggcaaggtttctagcgccttcatcgcaaaaatacctcccagtgataagccaaaaacaaacaccttggcgtattttgcggtcatatgcgcaaccgcggcactactttctgcccaccaaatatccgggttgccttttgtcaaaatatctaacggctccactgtcccatgcccggaaaaaagcggaacataaaccccataaccggatcgctgcaaggcccgcgccataaaattcatatcattggggctacccgtgtatgcatgtaacaataccacgccagtatcggtaccttcatattcgaatggttgtggtttgcggaaaatcatgatcaatcatccttcgtgacaatcgattagcaagcaatcctaaaagaccgccaaccgataactgcctgttgccctgcctgacataaagagcttaaattaaatggttatgtcagcatactgcagattttatgtactctgcaaaaaaagtctcctgaatgttccaggagactttgttttagtgggcttccagataaaccagcgcgatggcaagcccaaagaaaatgacacccagtacgacggtgactttctccataaacgcttcaaaaccgcgcgatttcgtcttcccaaaaagatctgttgctccaccggacaatgcgcttaaagcgtcctgttgtttgcttgggtgcatttaaagttgcgatcacgatcaaaaccgattcgatttgggcactggcgatttcaaacgattgcaaccttgttttcaggtctgattatgttagtcgttggactggacgtggtgcttgatggctaccatggtttgcaggcatggtatcaaggtaaggtgcaagttcccggtgttttggcggtttatgtgagcttggctgcgggggtggccatggcgagtgtttcgttgatgaatcatattcgcgccaagcaattggacagcagcgttttacggacagcgtctaaagacagtttttccgatgctgcgactagcggtgggactttactggccattctaggtgcgaaagctgggtggctgtggctggatggcggcgcagcgattgcggtcggccttttgattttatatgccgcttggacaattcttcgtgacgccatttttgaattgacagatgggtttgacaccaagaaaattgcggcttatcggcaaacgattacgcaggttccgggagttctcggggttcaaagcattgaagcgcgttatgccggcgatgcggtgttgttgacgatcggcattcgggtggatccgacaatgaccgtggcggattcttatgaattaggcgaacgagtcgaacgcaaattgatggatgcgtacgatattttggatgccgatgttaaaacttatccggccgatttaacaccggaagatgcgccgcaagatccgtaagcttgcggtggattttccgaaacgaggcttttgggagttagcgcgcggttttcgtggatgagtttaacgactgcctctgtacaaatagcgtgcatgtgttaaaatttgagctataaaatttaccagctgagtcgcagtagtgttatctaggtaggccttcagaaaaacggtggttgctgcaaaccgttccgcctgatagcacgaattacagctcaatgaattctggccgcgggtcatgccgatatccatgagagtgatgcaaagcataatttgggtggtaccgcggtgaaagtcgtccctgatcttagttgatcagggacgacttttttcgtaatcaggtacattttggctcgaggctaacgtgctgatcatgctagccatatcgtaacgaggaggatttttctaatgacagaaacacagcaaggacagattttagatgaattaaagtggcggggtgcgctgaatcagctgaccgatgaatctgggctgcgcaagttaaccgaagaaaaggcggttagcgtatactgtggtaccgacccaactggcgattctctgcatgtcggccatctgattcctttcatgattctcaagcgcttccagttaatgggacatcgaccggtcattttaatcggtggcggaaccggttcgattggggatccatctggccgcaactcggaaagggtcttgcagacaatggagaccattgcgacgaacaagaagaaactgacggcacagatggagaatctgtttggaaccgatgattttcgaattgtggacaattacgattggctttccaaaatctcgatgctcgactttttacgggattacggcaagttgttctcggtgaataacatgctgaataaggaagtcgtggcaagtcggcttgagaccgcatttcgttacact

SEQ ID NO: 56 - DNA, 3572 bp, LACTOBACILLUS RHAMNOSUS
accaatattcctaaacgggcattgctaccggcaggcattacgggtggcgtgtcgtggtgtgcgtattggctgattagtcttcaggatcatagcctagtgttgcctaactttaccgcaaccgtggtgattggcttgttaggtaattattttgccatccgtcatcgggtgccggtcaataccatttacataccaagcttagtctcacttgtcccaggcggcattgcgtatctaggcgcgcgtagttttaccatgggaaaagccgcgagtgcagcccagcagatttataatgtcatcttgattgccatggccttggcagtcgggtttgtcgtggcggaggttattttcaaagccatgcgcccatttttgattcgcttcattgctaagttaccaaaagttcagacaaaatcacggaggggaaaatcagcatgagtttattggcaaccttgttacaggcgctggatgacgatgaacaggaaatgattgcgattcgccggcagctgcatgcacatccggaagtatcgtttcacgagaaacaaacggctgcttatatcaaagcctattacgctgcgttggatatgccagtcgtgccatgtggtgacggttatggcatgtacgtcgatattgaaggcgggcagccggggccgaaattggcgttacgggcggactttgatgcgttggcgattcaggaagataatgagctcccgtttaaatcgcaaaatcccggggtcatgcacgcttgcggccatgatgcgcacacggcttacttattggtattggccaaggaattgaacaaaattaaaacccaactgtcaggttcaattccgatcattcatcaacctgcagaagaagtatcgcctggtggggcaaaaggcatgattgcagctggggtcttagagggggttacgaatgtcatcggggttcatgtgatgtcgtcaatgccaacgggactcatcggctatcataccggcgcaacccaaactggccgggccaattttaccgatacgattatcggcaaaggcggccacgcttccatgccgcatttgagcaacgatgcgattgtggctggcagttatttggtcacggcgctccaaaccatcgtatcgcggcgaatcgatccttttgatacggccagcgtcacgatcggttcgtttgacggggttggctcatttaacgccatcaaacaggcggtggtgttaaaaggcgacgtgcgcgtgatgaaggaaagtacccggcagacaattcatcagcaaattgtgacgatgaatcacgggttagaagccatgtttggggtacaaaccaagctggattatgacgacaattatccggttttgatcaatgatgcgacgttgacgaatcaggccatggcagcgatcaaagcagccaagattccccaaatcacggcgatcaaggataccggcgtccaggatccgtctgaagattttgcttattttgcgcagaaggttccgagcagcttcttctacatcggctgtcagctgcctgatggctcaaaccatccccaccacagtcctgactttatgctggacgaagatgccattctaatcgcggccaaggctgtagctgctgcgacattggggtatttggatcaaaataaaaccgtacagtagtggcaaaaaattagttgcaagcggctgatgcctttgacattatgagataatacgggataaagttatgcggcgagctgctaaggagattagtttggactagaaaaaagaatcgaagcactttgctgcgattctttttaagttggaattgtttgccaaatactgcaattcaagttcattttgttcccttcgcttatcctattcatgatttctggtcttcgtctgcgaatcgcttggtcaatatttctattattgtaacaactatccaaattattgggactattgttaatatatttaaaagagattgcatcaatgtcgcaccaagcagcattccgagaccaatattggccaaggcaagaatcacccaaaagacaagcttaaaaacaggtttgctaaacatcaaaagctgcgcctccgacaccatccaaatgatccaatctctcaataacttccggatttttggattttgcacctgatcctgcgacactggcaccggtgaggtacttttgcgcaccaatgtggttaatggtttgtcgtttggctgccttcacaatagtagcgttcttcatgtacgtttccctcgttgatcaatacatgacgttgctttcttgtcattaaagcgccggtttccttacgcctaatatagaacaacagatcggtaacgggacaaaaatattttaacgttgggttttccggaataatcgtcattttttggaacaaataaacgttaaatcgagttttctctacgttaatttaaggaaaaattcaagcatgtgatgatgtactgtacggtcgagatttcaggtctttgagccagactctcagtagtgaaacgaacaaaacaaatctagccgcagatgttatacggaggattaaaaaagccttagtgagcatttcctcactaaggcttttcaaattaactaacctgttgaacatatcgtttgattatgcagccgcttcactcgtaactgcttcgactttttccattgcagccgcaactttttgcggcgtcaaagatttgtcgaccaagatgaaggtttcttctggcttggctgcaaattcggctacttgaaggattttttcagcaacattttcggtaacgtgtaaatcttcaaggtttgtcggcagaccaattttttcatagaaaggcaataatgatcggatctcgtcatcatcaccggtttcggccagctgaaccaagataccataagccactttggagccatgtaaaacagcgtgggtttccggcaaatatgaaagtccgttatgcgtcgcgtgggcacctgcagcacggccgtcaataccgccaaagccaccgacttcaccagcaagaccgatgatggtgtcagcaactgcttcaaacgctggtgtatcacgaccggcatcaagatcagctaaggcttgctcggcgtttttaaacagaattgcctgaatggtcttggcggaggcgcgactcaattgaccgtaagcattcagttgatcgactttgtggcgggtgatgccgtccatttcgtaccacttggcaagcgtgtcgccaatcccggcaacgaaaaagtcgtgcggtgtgctaagcagtaggttgtaatcgaccaaggtgatgtaggctgactttttaaaatattctacgtaactgaaggtgtggccctgcgcatgataaatggcggccaagggcgtgaagggtgcacagttagaggcgagggtagggatgctgacgagttcagcccccaaagtttcagccgcgactttcgcggtgtcgatcaagcggccggcaccaatacccaccacggcatcggcttgaccgatttcggcagccaaggcatgaccgttctcgtcactggcagagccatcataatgataaaccggtaagttcaacttgccaggataagctttggtgaaggccgcgaaacttttctcgccagtaatgacgactggtttggtaaaatcctttaa

SEQ ID NO: 57 - DNA, 945 bp, LACTOBACILLUS RHAMNOSUS
tataggcaagggcggattttttgtttcctcctcggcctcaataaagtttgaagtcaaaatgctatatcgggttgcccgactaaagaattcgcttgagtatcaacatctgcatttattgttattttgggaggaacgttatgtggaaagttattaccgatgcagttccgcaaatgatagcagccggcattaaatacaccattccaattgcactcgtgtcatttgcgatcggcctgatcatcgcacttgtaaccgcattgacgcgcatatcggttcgtaaaggtattttgatccgaatcgcaaaaggaatcgccgttttttacgtttggctctttcgctcaacgcctttgctggtgcagttattcatcgttttcttcggcttacccagcctcatcatcccgggtattttcccgcatggcatcaagttagatcccgcggccgcgggaattataacattctcacttaacacgggggcgtattgtgccgaaacgacccgcgcctcgctgttgtcgattgattccgggcaatgggaagcggcttatgcaattggattgccgcggcgactggtgctgcgcgaaatcattattcctcaagcactacgaacggccatcccgccactgtcaaatagtttcatcagcctgatcaaagacacatcccttgctgcctcgatcaccattgtcgaaatgtttcaagtcagccaacaaatcgcggcggaaaattaccaaccattactgatgtactcaatcgttgcgcttctgtatgccattgtctgcactttcttagcttggggtcagcggtatctcgaaaaattcacatcacgctacaatgccaatgcacaaaccacgcaattataatccgccattttgaaaggaagaaagctatgttaaagaaaaagttgtggttcctgttgccgcttgtggccttggtaaccttcacgctcaccgcttg

SEQ ID NO: 58 - DNA, 5683 bp, LACTOBACILLUS RHAMNOSUS
tcagataggatagttgcatggtttgctggtagtcttattttaagattccggacttggataggttaaagttatttgtcccaagtgtttggggggcatgattgaataccacatgaaatgatcaaggagagtggtttagaagagactttttgatgagactgcataggtcctaaacaaaaaatctacctcatttttagaaaattgagattgcgctataagtagtttcaaataacaagcgccgccgctgagaactgaaaaagttcatggtgacgatgcttgttttcttgttaataaaaaatgacccgccattaggccgcaaacgttcaattgcaaggtacacttaaaacggcttcgataacccttatgctttaaggaatactgaagccgttggttttttagccttttcttatcgtaaacagttggcttgaacttttgtgaatacaagactagtttgctaacgatcccagttagctaatcccattcaacaattcctgacgcagatttgcgtaagcagggtcggcataggcaacatctggtgctagttggaagaaaggatttttgtaggtggctttgatgatgccggggtgcccgttcatcacaacgatccgctggccgagaaacaacgcttcgtcaagatcatgcgtaatgattatcacagcattttgagttgcctgccataagtcaaacaacagggcgtgcatatcggcacgagtgtgattgtccagtgcactaaatgattcatctagcatgagtaagggtggctggttaataaaggcgcgggcgagagcaactcgttgttttaggccgccggaaaggtcatagataggctgattggcgaaatggcgcagtccggcgcggtcaaggagagctggtagattgtcagctgattggtaacgcattttaggaccgaatagaatattgtcgcggacatttaaccacggataaagtgccattgattgaaagacgacaccgcgttcccatgacgggcctgcgatagggatgccgttcatggttaaggttccttgactaggtggcaggtagccggcaatcagatttagcaaggtcgttttaccaatgccggaaggaccgacaatgacggtggtcgaatttgatgcaatgtttaagttaatattgtggacagttggtaagcgctcattttggtaacaataagctacatgatcaagtgtcagtaatgacatgattgccccctagttgagatatcgcggtgtaatgaaacgatcgcagtctttttgactcactggtttggttaatgtttgttggcgccacataaattgtgccgtttcgaaaaattgcgcgcgaaattgtcgcgtcataaatgttcgttgggattgatcggatagccattgagaggtgccaatctgtttcttaacggtggcaaccggtagcgaaaggctcttggcggccgttcgatagatgctttgaggaagatcttgatactggctgtggatcttgtttaaagttgccaataacgttcgaagcacatctggctgtgttcttatgaaagcatctgttgctagggtcacattggcggttaggtgaccggtttgcgccatttgacgactatcaatcagctgtttgttgcccaataatgccgagaggctgggttcccaagtataagcaccatcaatatcaccacgctgccaagccgccacgatttctggtgtttgcatgtcaagcacctcaacctgattggttaagtggtgctgctggagtagcatcatcaagctataatgcgatgttgaggcaaacggggtcgcgattttcttatgcttgagttgtccccatgtgtcgattccggctttttggcgaattaccaaggcctcgttactgccgatgatgtcgttaatccacactagtttagcggaaataccggcagccagtgcaaccacggcattggtgtgccccatggttgccaactgaacatcattggcgatcaaggctttgttggcatctaccccagagtcgaaggcaatgaactgaacggttagcccttttgcttgacaggctttctgcagtaggtgacgctgacgggccacggccacatcgttaggaacccgaaggacgccgattttaatggtccccgctgatgtaggtgtggcgtgacaactgctgagcccaagcaaggagcagatgagaagcaacacccacagccataggcgatgatggtttgtcatgatgcccagtcaactccttccttgccatttgatgaaatgctgaccgaatcgcttgagtaaccagtctagtaacacgccggtaaggcccatgacaatgatatcgactatcatgacatcacttttaagataatgcgaagcgtcgatgaccatccacccaatgccactggttgaggcgatcatttcagctgatacaatcgttgtataagccatcccgacagcagaacggataccggtcataataccgggcagtgcggctggaaatacgatacgggtaaagatttgccgagaattagcgcctagcgaggcggcattatgccgatagtcaagattaatacttgacactgcatcgtatgcggctaagtaaataggtggtagtgcagcgagaaacaagagtaagatttttgaagattcaccaatgccaagccataaaataagtaaggtatagtatgccaatggcggaatcgggcgaagaaactgaatgatcgggtcgataaactgcccggttttcacatgataagcgcttagtaagccaagtggtgtgccgctcatgacggctaggacaactgcaactgttacccgtctcaatgttagtaaataatgttcccaaaaaggcgtcccattgtatccgaactgcaagagattcaccgctgctagccaaactcgtcccggcgaaggcaaaagaactggggacactaaatgaagccgcgtggcaagccaccataggctcaagataactgctggtatcaatagccacccaaaatggcgggatagtcgatgtttgatggtcatgatgggatcctccgttggcaaaaggctgaaaaccacaaatgtctagaccacccaggcctagacatttgtggttgatctaaaaacctagagcaggtcgaagcgatagttcgtcacaattggtttccgattctgagtcgtgtcttcgaaatattcgaattcacagagatccaagaaggaacccgcaatgttgtaaatattatggtaacctttattgccaagcgctcgggcaacgttgtaacttctttgaccactcaagcaatggatataaaccggttggtctctgggaatctcatcaagatgttcgcgaaaacgactcatcggaatgtttttggcagagatgatgtgaccttctgcaaattcatcaggctcccgcacgtcaatcagcatcgcgccagcttcgactaacggacgaacttgtgaaaccatgatttgtttaaattcgccgtttaagatattcgtggccaccagtccagccatattcactgcattctttgcggtgctaaaagttggttgatagcatagttccaaggtctcaagatcctcaacataattgtgattggtgatggcggtagcaataatatcaatctgcttatcaacaccgctttcaccgatagcttgtgcgccgagaatttcacctgatggatacgcgaagatcaatttcagatagagcggtttagcgcccggtataagtgccactttatctttagggatcacaagggcttcccgatagtcaattttggcatcttggcattggcgggcagttaaaccggtggaagccacattcatgttgaagactggcaaacactgggatccaatcacgccacgattgcggatttgacgaccgaaggcatgatcgacggcttgccgcgcctgtagttgtgctgggaaggctagattgaggcgtgttggttgccgtaagagacgttgataaacttcaatggcatcacccacagcataaacatgcggcaaatttgtttgaaaggcttgattaacttgaatattgccggttttgcccaacttgatcccgctttgttgagccaactccgtatccgctttaacgccaatcgccatgatgacgatatctgtcggtaattccttaccagaagctaaagtaatgtggtcattctcaattgctgttaatgtgtcgtgaacgattaaccgaacatcgttatcgagcattgttttttggacaagttgtgccatatcttgatcaatggtggccagaatgtggtccgcgccttcgattaaattgacatggtaaccacctttaaccagattttctgccgcttcaatgccgataaaaccgccgccgatgacggaaacattagttgctttgcgatctttaagcgcagtagccaaggctttaatgtcgtcaacattgcgaattgtgaagacattggtgttctgaatgccgtgaatggatcgcggcagaatcggtacggcgcctggggacaggaaaagatcatcatatgaatcggttgtcacttccccagtacgaacatccttgacggtcaccgtttgtgtctcagcgtgaatggctgttacctcatgattgacgatcgcatcaatattatattgttgcttaaattgttcagaatccatcaaaacgatactttccgcgtccggaatcatgccagataggtgatagggcagcgcacaatttgaaaatgagacattcgggcccttttcatacatcgtaatttgtgcagattcatccaatctacgtgcgcgtgccgcgacagatgcaccaccggcgacgccaccgataacaataatctttttactcatgttgcatatcctccttgagaagtttatttggtagataggttgggcaaagcgctaatttaccttggaatagtttgatagcaaaagcagcccctaagatcaagaaaagcataaagatataaccgtgtaacgaaaagttggtgatagatgagtaaagcgcgccaatgttgcagccgcgtgccattcgagagcctagacccatgagtgcaccaccaagagcatagccgctaaaatctgccaacgacattttgagattggctttgaaccgacctgccagcaagaaagcgatgagtgccccagcaacaataccaatgttgcgaacagttccgccgtctgcccacaggggaccgctcatggcctttgcggtttcgtcaaaagccggtgaagtgaaatgcatcccgaacaactgcaggaatttttggtccagtggacaaatggggtgttgacgcaccatgctttattagtggtaatcataatgaagtgggcagcaagtgtgagtccaattcctccagccaaaaatgaccagcgctcaatgaatattttgtgatacgtttcccatgaaatccatttgagaggcgcggtgtcgttcacagacagcggcttttcgtagtcagcccaatccgattggggatgtaaccagggcaccggacgcttttttcttgttctcataggacttcgttagcattataaagcccaaatagtagcgcaatcgtgagaaggatggcgccccaataaccaatatattggggtagccacacgttaattccaattttgccaatggcagtattgtcaagcacgtaaccgaagtattgccttggtgcggcaaaaagaaatgaagaatgggaaggcaatccaggcatgaccctcaccttcaccaaaaatcgaataaggttccgaaaagcgcatccgccagccat

SEQ ID NO: 59 - DNA, 1258 bp, LACTOBACILLUS RHAMNOSUS
tccagtcgaattaacggaaggggccggctgatgatttattttgataatagtgcaacgacgaagatttcgcctgatgcgttggcgacttataacaaggtcagcacggatttttttgggaatcccagcagtttgcatgctctaggaactaaagcaaatgaggttttgcagagttcgcgagcccagattgctaaattaatcggtgctaagccggacgagatttattttacgagcggtggaactgaaggggataactgggtgattaaaggcactgccatggctaagcgcgaatttggccgtcatctgattacgaccagtatcgagcatccggctgtgatcaatacgatgaaacagctagagaaactgggatttgaagtgacttatttgccggttgatcggcgcggttttattcatattgacgatttgaaagcggctattcgcaaagatacgattttggtgtcgattatggcggttaataatgaaattggcagtatgcagccgattgttcaggccgcgcgggtgttggataattatccgaatattcattttcatgtcgatgctgtacaavccgttggtaaggggttggatgcagcgttgcaggatccgcggattgattttctcagtttttccggccataagtttcatgctccccgcggtaccggctttatctatgccaaagagggtcgcatgcttgatccgttgctaaccggtggcggtcaggaacatgattggcgctcaggcacggaaaatgttccggcgattgcggcgatggccaagtcgctgcgcttacttttggctaatgaagatgctaatgtggcccggcagcaagcagttcgcaagcggatttttgaacatgtcagccaaaagcccaaggtgacgatgtttagtcagttaacaccggattttgccccacatgttttatgttttgccattgctggtgtccgcggcgaaacgattgttcatgcgtttgaggatcatcagatttacatttccacaaccagtgcctgctcgagtaagaaaggcacggaaagcagtaccttggccgccatgcatacggacccgaaaattgctacttccgcgattcgggtgagtttggatgaagctaatactttggatgaagcggatgcgtttaatgcagcgtttgatacgatttatgcaaagtttgccaagcttgataaagcgaccgtctaaacgagcatcagccattgccagtgcgaggagtggcaggttgtcagtcatagcgactaatactgcggacttg

SEQ ID NO: 60 - DNA, 1596 bp, LACTOBACILLUS RHAMNOSUS
tctgcaaatgcaaaacatcgccacagctgggattacggacggttatttcatgatcgaaatcggttaacgtaccatgatgccgcgggtgttgggcctcgtcaagaatgaccgcacgatacatttgatccagtttagtcaacgccatggaaatacctccttgccgcctgcaccgtttcgactagcttagcaacatcatcagcattgttgtaaacgccaaagcttgcgcgaacggttgccggaacccctaatcgtgccatcaacggttgagcgcaatgatggccggcacgaacggcaatctgctgctcatctaaaaaggtggccagatcatggggatgaatacctgccaagttaaatgataccgttgccagactcgcctgattgccataaatcgtgacgtccggtatcgccgccaaccctgaacgcaactgatcagacaggtcgtgttcggtttttaataccgctgcatcaacattttgcttaaaccagtgcagcgctgtccctaatccgatcacaccggcaatattgggcgttccggcctcatatttaatcggcccctctgcccaagtgctgacatcatcgcggacttctgaaatcatttccccgccaaactgaatcggcggcattttggctagaagatcagcgcgaccataaagaaccccgatccccgttggcccataaattttatgcccggaaaaagcgtaaaaatccgcacctaatgtctgcacatcaacgggcaaatgtgccactgcctgagcgccatcaaccaccaccaccgcgccaactgcatgcgcctttttggcaatggcggcaatcggtagcgtatcaccggcaacattagtcacttgggcgatggcaaccaaattggtctcaggcgtaatcgctgcaagcaaggcaggcacgtccaccatcccatcaggatgcactggggtcacttcaaacttggcatgttgacgcttggctaattgctgccacggaataaagttactgtgatgttctgcaccgctaaccacaatccgtccgccttcaggaactgcatgcggtccgaatgcactcgctaccagattcaggctatcagtcgtgccgcgcgtaaagatgatttcatcagcacttttggcactcagaaaatccgcgacttcctgccgcacaccttcataggcctcagtcgtatcataagccagcttataaaggccgcgatgcacattggcattttcattaatatagtagttttgcaggctatccagcaaggcttgcggtttttgtgaggtcgccgcagtatctaaataaaccaatcctggatgagccttaaaaaaaggaaattgttcacgcatcttcagccaccaacgttcgatcaatcgttgcaaacagttctttctttagccgctgatcatcaatctcagccaaaccgccttccaaaaagccgcgaatcacgagacgtttggctaacgttgctgaaagaccgcgactcattaaatagtagagttgatcagcattgacgcgcgtcaccgaagcagcatgccccgcggtgacgtcattttcatcaatgagcaaaatcggattggcatcgccttcagcacgcggcgacagcatcagtacccg

SEQ ID NO: 61 - DNA, 710 bp, LACTOBACILLUS RHAMNOSUS
tgaatgatacggaccgcaatctcgccacggttggcaacgagtacttttttgaacacagttccacttccttacacgagtctgaatcgggtcgatttaaccaattgcaaagacaagttcggcactgcaagccatatcttcgccgacgtaaaccttgccttttcctaagccggcattgtcgatcaatttctctaaagtgacctcgatgcgcaaaacatcgccggggcgtaccatgtgacggaacttggctttcttaatgccgccgagataagctgttttacctttaaagtctggcatcgaaagcaaagcaattgcccctgcttgcgccatcgcttcgatctgcaaaacgcccgggaaaatcgggttaccgggaaaatgcccttgaaaaatctgttcattgatagaaacgttcttttgtgcaaccacagattcgccgggtttgagatccagtacccggtcaatcatcaacatgggataacgatgtggcaaaatcgcctgaatttcttgtgcttcaagtgtctttttggtttcgagcatgaatgctatcctcctaaaacgtgtttatggagccggaatgcgactcggtttacgctttgtcttcttgtacgatgagcaacggctggtcgtattcaactaagctttcgttatcgactttaaccgccttaaccgtgccgctaacagtacttttaatctcattcatcattttcatggat

SEQ ID NO: 62 - DNA, 2695 bp, LACTOBACILLUS RHAMNOSUS
tgagtcggcaatcgaaagccaaaaaaactcagcgacttgatcaaatccgctttttgccaggacttgacgatgctcacttgataatgatgagcgctggcaagtcgtaatttaatgttgccactggtcaagctcgccgcccaaccgctttgggcaaaaggatcaaggctgccttgccgatccaacaggtgcaacacttgcgcgcgaatcgcagcatagcgcatgtgattacccttgaaaatgcgagttgtcaaactaatgcgccctaagatctcctcgtttgctggcgtggctttagtcgcaaccagcataggcggcatagcgacttcccgttgcggcgacaaggcctgcgttaagtccgttacggtcaaaccgctttgttgcaagtaggaagccagttgttcttgctgctgcgcatgaaaccccaagctcacttgggccatccccggaatcaaccgcacccattcgccgccgatcatggcttcaaaagtatgcaacgtctgcccataaaaagtagcagtcaccggtcgaatctcatcaactgtcagtaacggactcaaaaagtagcgggtcaactgttggaaaataaatcgttgtcttttttcatccaagctattccatgtcggtaacgtcaactcgtttacggccatgttctcaccctcgtttacggtgcttgcgtttctcggctagcaaggcttgacgccgtgcaactttggcattgcgcttgcgttccaataacactgctgtccggatcttcttacgatagttcggcatgtgcttttgtttcgcttttttcaccaagccgcgaatggcaaggctcgtgtcctcttgcttaggcttgcgctgaacccggcgattacgatcgtacgtgtcaaccagctcacctttttgaatggtcttaggcttaaatttgatgcccatatgttccaattcagcaatctgatcttcctggccgggctcatataacgtaatcgctgtccctggcaaaccattgcggccagtacgtccgacccggtgaatgaagaactcctgatcgcgcggaatctcggcattaatcaccatcgatacccctttgatatcaatcccccgcgccgccaaatcagtggcaaccacatactgatacttaaggtcagcgacttccttcataattcgccgccgttctcgaggctggatcccgccatgaatcttggcaaccttgagtccctgatgtttcaaataatcatgaatggcatccacactggttttcgtattagcaaaaatcaacaccaaaaacggatggcccatcgtcactaactgataaatcagctcgtttttgtcgcgccccttaactgcgattaaaatattctcaacggtatcggcaattaccgattgcggcttgagttcaatcacggtcggatgatccatatatttgcgcaaaaacggttcgagcttttgcggaatcgtcgcggaaaaaacggccatctgcaaatgttcgggaaaacttgaagcaatggcatcgacggtttccaaaaagcccatgtctaaagtcatatcggcttcatccacgacaaaatgacgaaccgatgccggaacaagatcatagcgcttgatcatatccagaattcggccaggcgtgccaatcgcaacgtgcggttgatgggcctgcaatttgtcaatctgcttttgcttgtccatcccgcccactaaacgactaattcgaatggccggttcggtttgcgtcaactgttgggcaactgcgtaaatctgattggcaagttcccgcgatggcgccgtaatcacaacttgggtcgcgtcttcatttggatctaccaggctaagcaatggaaccaaaaaggcatgggttttaccactaccagtctggctttgacctaccaggttctcgccacgcagcaacgccgggatcacctttttttgaatcggcgtcggctgggtaatccccatggcgtcaaggccggcaatcacaaaaggcttgagttggtattgtttgaattgattgtccataatgcctactttcttgttgttgaaaagtctttaactaattgatcaagttgcgtttcgatttgaatgatttcgtcaaaattggccgctttggctccgcttgccagtggatggccgccaccattatgttccttggctaggccgttaataatcggacccttagaccgtaagtgaacccgataaccgccttctgcctgttcaatgaactcagcccacgcaaccaccgtatctaaccgaccgggagttccgacaaccgcgcttacctgatcatcggctaaatgcaggtcattaattgccgtgcgcggtaccgtcacactagccgcaccagccggactgattttcaaatgatcaatgacatagccctgtaaacgcgcctgccccagcgtcacggtattcatccgattgttaatggcagtcggatcgaagtcttttttaattaattcagcagcaacctgcagtgtatgcggggtagtattgttgaataaaaatctgccggtatcgccaacaattccggcataaagcaaccgcgctgctttgtcggacaacgttaaagctccgtcactggcagcaatgagatcataaatcaattcagaagctgaactcgcctgattgtcgacccagacgagatcgtgaacaacaccatgtacggtcgcggcaccgatgatatgaaaagtgggctagcagccatgaccttggcact

SEQ ID NO: 63 - DNA, 4861 bp, LACTOBACILLUS RHAMNOSUS
tgatagtacaagtatcgggtaaatttccaccacgttcctagtcaaccatatcagctttggggagctgcatgttggctaagaataaagttaatgatgtagcttaaaggcgacctatcgccatcatccgtggcagccaagttgcgacatgtctgatcgtgcgagccacgcgaatattgcggaactaagcgccatcaccggtgtcagtacggccacaatttcgcgttttgccaaggccctagggtatccaagttttcaagccttgaaaatggcactggtccaatcaacacctgaaccagatcacacgctgtttgctgagcttagtcccgctgattcggtcgaaacgctggctcataagatcttcacctccaatatagatgcattacgtaccacgctgacaaatttagactcggctgctttaaccaaagcggtcgactggatcacccatgcaaatcagttaggcctttttggattgggcgccagcaatctcgtggccttggatggttatcacaagtttttacgaaccgctattccggtcgtttacgcggcggattaccatatgcaactgatggctgcaacacatcttactgttgccgatgcgatgattttaacttcccactccggcaaagacaaagatgcaattgctttggccgaactggcaaaaaagcaaaacgtacccttaatcgtcatcaccggcgctcccggctcacacttagccaaaatggccgatgctgcctttgttgccgtggctgaagaatcccgctatcgcaccgaagcccttcacgccttgatcgctgagctcaatcttatggacactttgttcatgatcagcgcgattcaaaccaacagtcaaactgcaccgcttttccgtcgcgtcagatccactattgacgcaacccggcagtaacaataggacacatcgtattacccaaagacgccattccaagtatacaaaaacggcagctcggatttctttttcgaggtgccgtttttcagaaaaaagctaaatctgattcaattaccgcaactggcttgtcacgttttcaacaaatgcaaaccagactgaattgattgtaaggtgacgtcatttgaccaatcaacgcgatcaggccacgcaaacacattgttggtgatgatcccgtcaaaatggcgctcattcaacacctgataaagcgttgtaaaatcgacttctccttcccctgggttcaagtgttggtgaatcgttaccggagccccaggcggattgatgatataccgcaagccaaaattacctttgtggttaaatgtatccgcgattaaaacatgggtaatccgctcccccgactcagcaaactgctgacgaatatctccacgcccgtcgtccatataaaatgcgtgcgcgctacaccaaacctgatgcacccaatccaaatccaacgaacgaatcaagcgtgtggcagcaagattagattcgatgaagtcattgggatgcggttgaatttccagctcgatattatttttttcaaacaccggcgctaattctgccatagacttataccactgtccctgagaaacaagcggctgaaacttatcgccagcaaattcagtattcaaaaccagcacctcaagctctgcggtaatttcaatcgtacgtttcaaattgcgaaccgcaaactcgcgctcctgttcatcaggagaagaccattgctgtaccggcagtatcgacgaaatttttacgccggcatccttagcgtacttttttacttgcttaattagcgtgtgatcagctactgggtgctcatagaaccaaataaaatcgcggcgtggcgacaattcaacatactcataccctaaccgcgcaacctcatcaaacatttgcttcaaggtcattgagtcgcggaacatagaaggatcataggctaacttcatggttgcgtcacctccgtactaaacactgcagttggctgattcaaccgttcaatacttgctaatatctgctgagtaagttgctggttggtttcggctgccaaccggcttgaaaatggctcaaatgaataatggccccgataacccattgcctcaaacaaatgaacctgctcaatgttttgcatgatatcgcgctcggtaatcagaatccgatcttcatccacaacttctcgcaatgcgtggatcggctcaattcccgacagatgaattaatccaacgcggttaatatcaacacctgctttgaattgttcggctgttagatgtgccaagaagaaatgaaacgtatcaatcgtcagcttaaactcggtccggccagataaattaatggcgtccagcgctgtccacggataccgcattgtgctggccctaaagcccaacggttcaatgaatcccgtcaaatgataagcagacagaatgtccccaaacacctgtaaactgctaacggcatcatcaagtcgctgttgctcggttcgcttgtcctgtgcgttaacttccggtacaaagataatcgcctgattgccaatttgcgccgacaattccgccagtttggtcaaaagatcgcgatttttgtttaatttggctggattattgaattgctgaatcgcattaatcgttaaaatctgcaggtcgtatttttgctttaacgtctgaaattctgcaacctgcatgccatcaatgacagtctctgagccatcagaagtggtcatatcattgcgtaactcgacttgatgaatgccagcagcttcggctaattgaaaaaagttttccagtggccgcttctgagcaatttttcgattcaaagccatttgtgtcagttctatccccatcacgactcccccacttctcttcgcctacccaaacaatctgcgacttagtgtgatcagttcctgccgcgggtttgggtagattggttttcacttttgctgcttgagcaatggcttgtttcattttttgttgctgatgagttgtcggcgtggatgagccggcgaaaactttcgctaattgctggtgggccacgcttttgacgtggggtgagagcactttttccgttacgatttgatccaattgctggtggggcttcaggagcaatggctaatggaggcgttgccgcatttgtgaagtcggcagcgattgatttgccgcgcggattacgcattaactgtgttagcccaacgattgtcgaagaatcttacgaacaattgaaagattcctacgccggttttacgccgatccctgcgcgggctgggcggccaccgggtattttgaaaagtgttcacggacagcagacggggcgggaaatatcgtatttatcgttaacaggtgattattaacggaggagtggttcctgtgggtgccatttttcaaatatgagttgcaagcggacaatacttttgcgctaaagactttgtaagcataaagcacatcttgaatgcgataaatgtcttccgccttgaccacaaggtactgatcattctgggcggctgatagattattggcatccaacaactttatgaacaacaatgagagaacatttaaaatgagatttttgcaaaaactggcatatggcgaatgacgcaaccttgatgtttagtgccgctggttaaaatatcgacgttccattcttggactgttcgtgaatatgatttgtttatttttgtgtttttacagctgaagcttcagtataattagagctatgtgaacgtttcattgtacagatgtcgtgtgcaggagctattcgaatcagaagacagtatttatactgagtggaggatgaaatgaaaatcaaatcaggcacctcggatcaagggtgggaactggtagaccgattagatcacgataatgtaaagtcgcaccctttttccgggaagggtgctgacttgaccattaatctcgtggttaaacaaggcactcaagttattggcggcgtggcggcgagttcggatgattacgggatcggctatttggagatgctatgggttgatccaatgtttcgtcggcaaggaatcggccaggcattgctagtggcggttgagcaggcacttttgaaggcgggatgtcgcaaagtcaggttagaaactttcgattatcaggcgccagctttttatcgcgccaatcaatatcaagtgttcggcaagttgcattatgcccatgcagcgttgaccgaatacttttttgtcaaaccgttgcagttgcaagtatcaccagtcttgccagcgacctatacgttagcctcaggggatgatgcagcgatgacttggattgaagatcagtttgaggcagagaatttggcgaagaagccgcttttgcaggaaaaaccgggaatcacgttcacttttttggccgaagaagatggccagtgtgttggcggtatctttggttatagcgctatgtatcgaatcggctacattgaagcgttatgggtcgcaccggcgtatcaacgtaaggggcttggcacgcggctggtgaaccaattattggccgcgttcaaggaaattaattgtccaatcgtccatttagatacattgtcattccaaggccccaagttttatcctgcgctaggatttcaacaatttgggaccgttgattatccagacagcgacgtgagtgaattgtttttcgtcaagttgatccaagattgaaaagagatgcagcatggtcagcagcaacagtatcatcgtcacccgagaagaagcgccagcaaaaaagcaggccattgtacgcgaagttttagccgacttacctgaatggtttggattacctgcatcaacacaggaatatattgaggcggcagcaactttgccactgtgggtcgctaaacaggatgatcaagtcattgggttcattgattttgataaaacaactcaagcaacaggtgagatcaactgtatgggcgtcaaga

SEQ ID NO: 64 - DNA, 7213 bp, LACTOBACILLUS RHAMNOSUS
tgattccgtttcctgtttaatcaaccagagcgtgtgcagtaaaaaaagaccgtgcttatctttcaacacagtcttttttcatctaaaggaagcttcaactagtctggttgggaatcagttgttgccaagtctgccagtgcatcaaaaaagtaagctagactcagataatcggccgtaccacccggactaagattaaacgtgatcatctcagcatttaactgacgcaaggcatgaggcaagtgtgaatccgggacatgcaacaatgttttagccgcatcttgcacgaatcgtaatccctttggcccgccgcgatggaggacattggcatcttcaacttgggccatcaagtgcaccattaatcgtaaatagcgcatatccccgcgtctggctgtcttgcgtaaatatggcaagatcacatgccggatagtcggataaccagccaaagcctcacctcgaaccccagtaacgccgtgtttgacatataacgcttcgccatggctccagcgggcttttttctccaagtcccgaaaatcaccagccacaccttgcgtcacttgagccaccgtcgggaatagcggcgcaaagtcagcggtgactatttgttgcagggattgctgctgcatgagccagcccaatgcacccaataaaaaaccaaaggagaagttagccccacgatgcgtattaacaccagcagtagcggcgagcatggcattttctgctgcaatcccaatggtgcgtaattggcgatagagatcaggaaccgttttagcaacgacgccggcatgaaaatattgctgaaaaaaaggcgtcaaagcttcaatgctagctgcaaggtcgtcacatccatatcccggtgtgcaccatttgattcagggtcgaccaagccgggtttaggcgccaactgaacttctgcttgtaaactggtaactgccgcttgtgcaattgcttgttcattcaatatgttttgccttcataactttcagaatatagtgcagggaatgctctaagtgctcgcgcgtaatgagcttaatttgatcgtcatcttgattcaacatcccccgataaagcagccaatgttcctgaatggcaagattgcgccgatcatcgccattaatactgatgtcacgaaaataaatcaaataattctgcagctggttgacgatcattttcagccgcaacatatgactggcatcataaataaaattattaaattcagtaaacttagccatcacctcggcaacacgaccggctgcgttcaaacgatccgtttcttccaaaagagtccgcatctgattgaattgctcaggggtcatcagacgcatggccttacgcgtggccaacacatccaattccttgcgaatgtcaaaaatttcataggcatcgttaattgaaatacctttgacaagtacaccaacacccgttttgcgttcaaccagatcttcttcatccaaacgctcaagtgcatagcgaattggcgttctgctgatatttagattttcggaaagattcttctcgttaatccgctcaccgctgggtatttcgcccaaaaggatcgtcttacgcagcgcttcgtaaatcgcttctttaattggccggttctgtgacaaatccaaatttttcttaaccgctgacaccacttgattcatcgattgtcccccctcacctaacccaatattataccttaacgtgtctcaccacttaaaacatgctggctcacgctcacttaaaaagctgccgacaaatttgtcaacagctcaaattgtgctagcctaccaactcacggccgcgcgttaattgattagggggcgaaaggatcatgtaccttaattatgagtaggatcaaacgtcagcgaaaccttttgaaccggcacatcataaaacggatcttcacgccggcctaaaaagtcttttgcctgatcagggaagagcgcataactcaagacatcttcttctgaatgagcatactcggcaatagctttgcgaaatgccggtagttgcggctcaatcaggtctgccggtcgcgtggtgatgactggtgcgtcaccaataattttctttttcatctcaggagaaatcgggacaggcggctgcccataaagtccgcgaacatagtctttgatttctttagggatcagtttataccgttctccgctcatcacattcatcaaactttgcgtaccaaccatttgcgacaatggggtaaccaacggcggataacccaagtcagcccgaacgcggggcacttcttttaaaacatccccatataaagcctcttgtccctgatctttcaattgcgccaacaggttagaaagcatcccgcctggcacttggtaaatcagtgactttggctcaacatctttaacgcgggggtttagctgcccggcatcccggaatcgatcgcgaatcggcgcaaaatagctggcaatgtcactgacttcagctagtttgacatcagtcgggtagcctaagtcctgcaatgccacgagcattgattcggttgccggctgactggtaccgccagcaaatggggaaaccgccgtatcaataatatcagctcctgcgcgcaccgcctcaagatacgtcatttcagccattcccgcagtcgcatgcgtatggacctctagtggaaccgtaatttcctgcttaatgccgcttacaagatcgaaggctttctgcggggttaaaatgccggccatgtctttaatggcaatggagtcagcgcccatgtctgccatttcttttgccagcctgatgaaatagtcaatcgtatggaaatcactggtggtataactaatcgccagttgtgcgtgcccacccgcctgcttggtagcttccagtgcggttttcaaattacgtgtatcatttaacgcatcaaaaatacgaatgatatcaataccgttttcaactgatttcgtgacaaaatcggctacgacatcatcagcataattcttataaccaagcaagttctggccacgcagcaacatctgcaacttggtgtgcttgactgcttggcgaattttccgcagtcgctcccacgggtcttcgtttaaatagcgtagacaagcatcaaacgtagcgccaccccacatctccaatgcgtggtagccggccgcgtccattttatccaaaataggcaaaatatcacttgatggcatccgggtagcgatcaggctttgctgaccatcacgcaaaactgtttccatgaattggactttttgtttagccatgtgtggtccaaccctcctttatgattgcttcaactgccgcttgaacttcaggcaatccgtgtcgacgtgagcgcgcgcaggctttggcgtctccgccacaaaccaagcaggctcgcggaggtaacttaaaatcggtgcgcgaaacctgatgcagttcttcaccttgcaacgtgaccacatccaagtccagtaagtcacaaaagcgttgttgctgctcaaatccgatcattcggcgctttaaactaaccgggtccatgtgcaccgccaagtaagcttcagggccagttggtaacgattcgatttgcatgccttgcacgtttggttgtaattgatcctgcaaggcttgcatcgcagctgtaaacactgtaacgacgcgttttccggttttgaccggtcccggaatccgcaacgtcacgtgtaatagcgtcgtgtccggatttgcctttaaccagtcatactccttggtcatacgcgcatctttggcggccaacatttgccctaagtcaacttgggggccatccaaaactgacaatttaaacattgtgcaccacatcgattaaggtaccatcacgatattcaatcaaagcaaccaccttgtcgccatactgaatagctgcaggcgtgcccgtgatctgataggccatgttcttgagtgcttcaatcgaaaattgtggcaccttcaaatccttaaacatttcaatcagatctggccgggccgggttaatggccacgcccacttccgtcacaacaacatcaacactggctcctggggtcacaacggtattcacattttcgacaatcgttgggatgcgtccacgaaccagcggcgcaatgaccatgctcattttgcaggcggcacttgtgtcactgtggccaccggatgcgccacggatcacgccatcggaaccggtaatcacattgacgttaaagtccgtgtcgatttccaacgctgacaaaatagcgatatcaagctgattaatgaccgcgcctttgctcaacggtgacgcgtacatgttagcatcaatttcatagtgatcggcattttcaccaagcgagactgcagatgggtgatcgaagtcctgcacgtcgatcactttttcaacgagcccctctttcaacaattcaaccatggagttggtaatcccgcccaaggcaaaacttgctttgatattttgctgcagcatcgcctcacgcaagaagcgggctacggccaacgaagagccgcctgtaccggtttggaaggaaaagccatccttgaaataagcagatttcgtgatcacttcagctgcatattcggcaatctttaattccttagggttcttcgtaaagcgggtggcacctttagcaataccggtcgggtcgccaatcgcatctacttgaaccacatagtcgacatctgtttggggaatactgatcggcgtgttgggatatggcattaggctgtcggtaatggcaaccacttgatcggcatacttggcatcaatcatggcatagcctaaggaaccgcaagtcgctttgcctttggtaccgttaatattaccgtattcatcactacttggtgcgcccaagaacgccacatcgatatgaatatcgccacgagcaatagcgcgagcccgtccgccgtgagaacgaatgacaaccgggttttgcatgattccgcttgaaatagccgcgccaactttatcccgcaaaccggagctggtgatgttggtaaccacaccatttttaatgtgttcaatcagcggttcatgaacattggcaattgaactaggggcgatcgacaggtttttgattcccattttggcaatttcagccagtaccatattcatcacatagtcaccttcgcggaaatgatggtgaaatgaaatggtcattccgtcttttaggccggttgcgacaatggcatcatgaattgacgccactagtttactgtgatcaggcttgacgggtttaatgtggcgcgcatgttcatcataaggttgaatattggcaaactcgccaccgaaaacgccatattgatcggcaaacggctccgggatttcacgattaagcttattcttgaccatcagtctacctccattcctgacgccttagcgagcgcaatcgtgtattgagcacgctctaccactggcttgtcaaccatctgaccattgaccgaaaccacgccggcgcctttagcttctgcttcttttagtccggcaacaatttcccgagccttttgaacctcagccaaagcaggcgcaaacacgctgttgatgaccggaatctgccgcggattaatcacggatttgccatcaaagccgagttgcttaatcagctcggtttcatgacgcagaccttcttcgttgtccacctgcgtgtaaaccgtgtcgattgcagaaatgccggcttcacgggcagcatgcaaaataaagttgcgggcaaatgacaattcggcaccatcagcggaacgatgggtatgctgactggttagatagtcttcggcgccaagtgcaatcccgatcattcgtggggatgcctgggcaatttcccgggcattcaataccccttctgccgattcgatggcggccatcatatgggtcgtgccgtttttgataccgtactttgcttcaactgccgtaatgaccgcatccacgtccatgatgtcctgtgccgtttcggtttttggcagccgaattacattgataccgccaagcaccattgcctcaacatcctgatcgccgcctgcatccaaggcattcacccggacaacggtttcaacactgctgtaatcaaaagttttcaatgcagaatagaccagcattcgcgcggtatctttttcttttaacgaaaccgcatcttcaaggtcaaacatgatggcatctgccccataaatcggcgcatcacgaagcatgcccggattagcgcccggaacaaacatcatggttcttcttaatttatccatgcgttaatctcctcccagtcaaatgtcttgttgtcagcagcgcggtaagccgccgcaatggtgcgtgctttgatcgtacaatccagtgcacctttgtcattggcttcaaccgcaacgttttcgatcgccagttttgcaagtgttgctttgatgaccgcacgaatttgttcgccaaattgcttttcaacactgctttgcaactgaatcgtgataccgtcagcggctggtgcaagcgtgatttgaatatcacttgactccagtgtcccagccgtaccgggatgattaattttcatgggttgatcgctcctttatttctgtataaacctctggataaacgagttgttgcaccgttttccaatcctgttgtgcaatcgccgcccgaacccgcgtggcactaacaacttcgccagcaatctgcaagcgcggaacaacaatcaattcgatggtgtcaccaaaagtggcggctaattggcgattgtaaatagcggtcacgggtgacaatggctcttcaccgacataacgccgggtaatgtctaaaatgggggcaattcgctgtttaaaaagcgccgcatccaattcggcttggaccgacgaaatggcccgtatcgcctgtaccttggaaaataactcggaaacgtggtattcgacaccatgtaatcagcggttggcaacaccacgacattcgcccagcgtgaggcgattttttttacgaggcccaagcgttcggcagcggtgaaaagcgagcgttcggctgacagcacaaagacgtaaaccacggcattgtccctagctgcctgctcaatcagatacgcatgaccgcgggtaaccggattggcgttcatcacaattgccgcaaccggctgtcctgagtgctgatgctgctccaacaatgccgtgtagtcagcaaaattaggataaccacgttcgagcaaaaccaccgtgtctgttgccactaactgcttaaagcctaacgattcaaaaaactttttcgtgcttggcttggtatagacaaaactatgcgtaatcgtctcatcatccagcc

SEQ ID NO: 65 - DNA, 1206 bp, LACTOBACILLUS RHAMNOSUS
  MISC_FEATURE (1)...(1206): N = A,T,C OR G
tgcagtgcatcaccacacaaagcagccgtctcgatacgaattttgccttgatataaccacccatatcagagataggttcgaaaaagcggtcgaataaactgcgaccgcaacgctattcaatattcttatcagttatgcctttgactatctcagtagcaaccggcgacacttttaaatgttaaagtaccaataaatcagccggtgctggttgactgagtgattgattaccgtcagccgttaccaccagatcatcttcaatgcggacaccaccaagctctggaatatagatgcccggttcgtctgtaacaacattaccttttgcggctgggacgtcaagatatggcccccaagcacccgggccttcatgaatcgataagccgattccgtgacccgttccgtggccaaagtactgaccgtaacctgcatcattaatggtgtgatgcgccaaatcgttaatcgtccgtccgagcacacccggtttcagcgcttgttgcactttttggttagtttcgtaaacaatcttgtaaatcgtcttcagcttaagatctggctggccgactgcaaaagtgcgggtaagatcggacatatagccatgataaatgcagccccaatcgagcgtgaccacatcacccttcgcaattttcttttcggttgccgcaccatgaggcatggccgagcgggcacctgaggccacaatcgtttcaaacgagacgttgctggcaccgagtttgcgcatataaaagtccaaatcattggcaatatcaatctcccgcatgccgggcttaatggtcgccagcacatgttgatagcctttttccgcaatggcaacagcctgtttaatgagagccaattcatcatcgtctttaacttcacgctggcgctcaacgaaatcgcgagttggcaccaaggtcccttgggtcaacaagtcaaacgcttcataatctgcatagttgaaatgaacggcttcaaaacccatatgcgttaattgcaaccgattggncaattttcccgccgacttaaacaaacccatcctgatgcaaaacccatttcgggggtgttgcacctggctgttttaaaattgtttcggtaaacccgcggaatcaagtaataaaaattaactttttttccggtggtcacccagcaaaagaaatttttatttggcccgggaaaacccgggcaaaattaaaggaacgtttggcggcattt

SEQ ID NO: 66 - DNA, 2802 bp, LACTOBACILLUS RHAMNOSUS
tgcgtttgaggcgcgtttgctgcgctggcggctaccattggcttatgatactagccatgcttttatcacgttacacggggataatgaacgactgatagcgagtctggccaacctaaaaccattagtacggcattatcatttggttgactcaatggggcagacgcatgacagtttgcctttgggacaaggccgaattgattggtaccgcgttttaccgcagctcaatcctaacgccagccggatttatgaaatcggtttgaaaaatcagtttgattgccaagaaatgatagccagtcaccattatctggaaaaggttgcagcaaagttggcggcgggaaaacatccggcctagttaagtaaaagaccaactggcgggtgggataaagcaaaaaagtgcacgggtgccgtctgcatttacaagataaagaaaacgtgattgtaagtcagggtgatttaacaacagttgtaattcccacacgcgtaatggcgattttcgatcaggtttgggcttaaagattaattgtggctgatcattttgggttttcaaaataaaatcatcaaaacgacttggtgctggtgttgtatttaacagtactgaggcgtttttactttggtcagcgagtaaggcgagcaaatcaatgacgcgcatcaacggcacctactttctatggctaaaagttaaggattggtgaagacgggtgttacttccgaaaagaatcgcatacaatttaaacagtttaacatgaacttatgtagctagacataaatgcaatcacggctcaaggaaccggaatctgggcgattaacggtgcaagccacgatttagatgttttgtttttcggactgtgataaactataacggtttttctgagcgggcattggtggtatgtagcggttgctcaggtcagcgatggaatcttcttcgatgtattataacgcatgtttgaattggattcttgaccgggcggctcggcgcttaccataacgcgttcgccagcccagaagtctgcgtgtaaggaccttggacgcaatgaccaaagcccgattatcacgcccaaggccacttacactcagacttctaaccgggccggcccgcgctcaccataacgcgctcgccagcccagaaacctgcacataaggaccttggacgcaatgaccaaaaggcggtcatcacgcccaaggccacttatgctccggtttctaaccgggctggctcgcgctcacattttgaaaaggggttattatggataaagttgtgattcttagtgccaagcggacgccgattggaaagttgggcggtgagttagcaggtgctagtgcagtggatttaggtgttactgcagctaaggcggcgattaaagcagcacggcttgatccgcaacaacttgatcaagcaattttcgggaatgttttgcaggctggatcgggacagaatgttgcgcggcagattgcgttgcatagtggcatggcgacgaactccacggccatgacgatcaatgaggtttgcggctctgggctaaaggcaattcggttaggtcaggcggcgattcaactaggtgaagctaacgcggtacttgtcggcggtaccgagagtatgagtcaggtaccgtattatgctgaggcgatgcgggccgggcataagtttggcgatactgcgttggtggatgggcttagtcgcgatgggctaaacgatgcttttagtcaacaaccaatgggaatcacggcggaaaatgttgccagtcgctttcagatcagtcggcaagcgcaagacgagtttgcactgcgctctcatctgcgtgcggccgctgctgctgcagaaggccggtttaaatcacaaattgcgccggtgaccatttccggccgacatggcgatgtcacgattgacacggattcggcgattcgaccggatacatcattagcccagttagcaaaattaccgccagtttttgaagttggcggtaccgtcacggctggtaatgctagcgggattaatgacggggcggctgcattgattcttatggcgaagtcaaaagccgagcagttaggcctccactatttggctaccatcactgactatacagaagtcgggattgacccggacatcatggggtatgcgcctaaattagcgattgaccagctaatgcaaaaaaccggacaaactttaacagccattgatcaagtggaattaaatgaagcattcgcctcgcaaagtgttgccgtgatgcgtgacttaggactgactgacgaacaggtgaatatcaatggcggtgcgcttgctttaggccatcccttgggagcatccggcgcgcggattatggtttcattactgtataatttggccgaacgcaggcaacaaaccggtatcgcggcgttatgtgtcggtggtggtatcggtatggcgatgcaggttactttgcatgattaggagcagatcaaaatgaagttttatgagcaaacgcccgaagccaggcggcagcaactcgtgcaagaagggtcattaaccagtaccgatgccactttattggctgcagcacgcatgcttcctgatgctactgcgactcggttgattgaaaatgcaattggtgaattttccttaccgatgggcattgcgcgaaatttaatggtcaatggccaacaacatcaagtaccgattgttaatgaggaaccttctgttgttgctgcggccagcaatggtgcgcgaatggtagcggaaaacggcggcgttttagcgcatgtgagtacccatgaagtggtggcagaagtggtcttaactgatgtagcagatttgaatgcggctaggca

SEQ ID NO: 67 - DNA, 9170 bp, LACTOBACILLUS RHAMNOSUS
tggctcaaattactgctgcacaagttaaagaattacgtgatcgtacccaagtcggcatgatggatgctaagaaggcattggttgcagctgatggcgatatggataaggcaattgatgtcttacgtgaaaaaggcttggcaaaagcggctaagaagagtggcaacatcgccgctgaaggcttagcggaaatcgcagttgacggcaatactgccgcaattgttgaagttaactctgagaccgattttgttgcttcaaatgatcagttcaaagactatgttaacaaggtagctgctgcgattgctgctaataagccagctgatcttgatgctgtcaaggccaccaagatgagcgacggccagaccattgatgaatgtgccatcgccttgaccagtgttattggtgaaaagatcagcttgcggcgctttcagattgtcaccaagaccgacaatgaacattttggtgcctacttgcataatggtggccaaaattgcagcgctgaccggtttttggatggcgcccatgatgccactgccatagaccgtgctatgcatgttgctgcgatcaatcctgaatatttaaatcgtagtaaagtggccgcttgtgaaattccaccatcgaccgccattttttcttaggaaaaccaaaaccaaggccagcccggaaaaaattgttcctccggatccgttaaagtcgcggttaacaaaggggggagtggaaaacccactggttgatcaggaattcgttaagacgatctagtcgtcggatatgataagcctttgttgcagccgattaatttttcggtggctaaggatcaggtgattgcatttgaaggctttaacggtgttggtaagtcaaccttattgaagacgattctcggtttgttgccagcactgggtggtagtgtcgagattgccgacaatgtcacttttggctattacgaacaagaactgcactgggatcagcccaagcaaagtccggttcagtatttgcaacaacactttccggccttaacccaaaagacggtacgccaagtgttgtcacgaaccgcgttgacaagtgaggaagccaataatccgctaacgatgctgtcaggtggcgagcaagctaaagtcaaattggctgatctcatgttacagacaaccaatattttggtgatggatgaaccaacgaatcatctagatgacgacaccaaaaatgcgctgcgaaccggactgcaacagtatcccggcgccgttttactcgtatctcatgaagcaggcttctatgatcattcctgggtcgacacagttgtcaatgtcgaacaatttcaagtcaaagaatgatagcggacaaaggctagttacgatgattaatggcggtgcaacaagctaggacaccaaaatcagacgacacctgagcgaatgcgatggtgtctttttatatacgcgcaataaatgaactgatcggcgggggcacgcttaattcttgggatgccacatcaattgtgtatatgcataggtcaggtgatcggttaccggcatgtgcggattttcatgaccggtcaatgctttagccacacgttccgccgccttgacgcccacaggtaaaccaagttcgggcagcatatcactgacagtcgtttgctcctctaggtggtaagtcagcgtgtgcgtttcaaatggaatttgatgtaagcttaaccaattttgatagccggcaacgcgacttggatcggcttgataagcgaccggcatatcgtggcctaaaagagttagagcgtggcgaaccaaagcatcatcttgctgtgtttgaaagttcaggatgactgtttttcgcgccagagcgtttaaaagtgataactcttccggcaatagcgttggcagttgactgacaaagacaagatcagcacttgtcgatgaaacaagttgatgccaatcatcggtgagataagtcatgcttgtttttttgttggctttcaatcgggtttttgcatatgtaagcatcgccgaagaccagtcaattaaggtgaggtgacggacatacggggccaatcggatagcaaaacggccggtaccggcagcaaggtctatcaatgagtcggctgggagcaacccattagcgatcatccaggtagtcacatcatgggcaagcggtagccgggaatcttgttcagcggcagcatagtctgcggcgaagtgattccaaaaatcacgatcttcctgcataagaaaagaggtctccttttttgaaaaactttttttaaaaaagttgttgacttgggatgggaaactgcgtagtatagtacgagttgtcagtcatcaaacattttaagccgctcagcgatttaaaaaaagatgttgacaaagagttgccaatttgatactctaattaagttgtcgcttggcaacaaggtagtcctttgaaaactgaacaaagtttcgttaaatgtgcagggtccttgatacttcggtatcgaggcaaaaagtaacatttgcgaagtcaattcgctagaacaacaaatcgagctattcgaacagctcatatttatatgagagtttgatccgaaacagcgcaaagccgatgtcagtgcggaaaatcgtcggggtgccattgagcgcaagtttgccttcttgaaaggttcacttgggcttgacttagtgaacaccagaacggctgagtccttggtggtaacggtggatagcgcgattgcattggcaaatatcgacctcctccttaagcttttttctgtaccaatttctattgtggtcgaacagggtggcctgcattatcaaatcaactataaagtgactgaaattcggccagaaaccgcaacctaaatcaccagccactatttagttaacaacagttctaatattaagaggagtcgtgatgactgatgcaggatgacaacgttggggcttactttcgagagattcgtaaacgacgagaattaggaatcgaacaagtgcgaggaaatttgcatcaatcaactatttcgcacttcgaacgcgatcatgatgacattactgtccgcaatttacttcagatccttcagccgacttttacaacacctgaagagttttgtttacttatcaatggtcaggatgaatcaatttccagtattctcaaggaaatatctgaatattacgatcaacttgacattgctggtttaagggcattttcagccgcatttgaacaggcgcaccctatgactgcacctgttcgcttgatcttgttgattcttgaaagttgtgtgaaggaattggtaggtgaagatccccttttgtcaggcgaagactgtgattatgtacaagattatttgttgcagccaggaaaatggtttagttttgagtatgttgtttttggtaatcttgcctcatcactacccggtgaagttaacttgcgactttggaagaagatgttgacttcttttcgtgagtttcacttggctacatacgatgaactgctcgtcaacattttgtacaatgttgctgcttcttttttgagtcaagacgatttgtcatcagctgcgtatctcctgcagtcgctggatttatccaaggtagatcattacgttctttatgttcgtcatcatgttgcttttttgaagctagttttgagttatcggctagatccccaaaataagcaaaataatgagaatctcaaagtattcttattaggcactcgaatagttgatgaagcacttttcaaaaagaatgttgatgctttgaaggaactgagtgttgatgttcatacaatcctgccatcggaaacgtgaacaataggtactcctgatgattaggagataggttgcgcaagtggtatcaaaaaagcgctgacccagcctttctaggccaagtcagcgcgttctttttgtctacaagaaattttccaaccccacaaccaaatgatccgctgcctgaaccttgcgaatggcaacggcgaccccttgcatgaagctttggcgatcgaaggagtcttggcggatggtgagggcttcaccgggaccgccgaagaggacttgttcgtgggcgatgtaacctggtaagcggacggcgtggaccgggacgtcatcaatgcgttggccgcgggcgtcgttgtcgatggtggacaatggcttttgggtgcgtccggcggcgattttgtgcgcagtggcgatggcggtacctgatggcgcatcggctttgtcctgatgatgcatctcgataatttcggcgtcagggaagtaggcggcggcttcctgcgcgaacttcattaagagaaccgcggaaaggccgaagtttggggcgattagaccgccgatatgacgggcttgggcgagttcgattaagcggttttgatcggcttgcgtcatgccgcttgtgccaacgactgggtgaatgcctgctttgatcgcggcttcaatgttggcagcgacggcagtgggattggtaaaatcaacccacacatcggcaatgtcgggattgagctgatcatagctcgtgagcacttttgtatcagctggtagtccatatttttgggcatcagcggcagttgctttgggatcaaaaacggcacttaatgcgaaatctttttgtgactgaaccattttgactgttttttgacccatggcaccgcgaaaaccggcgacaagaacgtgaatcatgcaagcacctccgcttcaattgctgatagttccgaaacccctaacagatgggctaattcttgttgttgtgccgctgttaatggcagtagcggtaaacgcgggctgccgactttgaatcccaaagcattaagtgcggctttggtaggcgctggggatggaaaatggaataacgcggccattttcggtaacagttgccgttgtaatgcagctacagtggtgatgtcaccgcgatcgagcgcacgatacatttcccggatgctatgggcatataggtgggaggcaactgaaataacgcccatcccgcccagtgttttgatcgtcagcgcttgagcatcttcgccggtccagacattgaaggcatcgtgtttggttcggtcgatgatatcgctgagtgctgccagactgccgcactgcttgatcccttgaatcatggggttttgtgccagcgttgccacggtttccggtaacatgtttacgccggttcgccctggaatgttgtaaataatgatcggtttttgcgcacttgccgcaaccgtggtatagtgcgcgatcatgccatcttgatccggcttgttgtaatacggaaccacaaccaaagtagcatcaattccggcaattccaccgacttcatgcgtaaaatcagtggtttcgcgggtgttgttagaccctgaattggcaatgacgagtgcgcgcccgtgaaccatggccacaaaacgggtgtaaagggtgatcttttcatcatgactcaacgtaggcccttcacccgtcgtagctccaaccacaaacccgtcagtgccttgatcaatgagatgatcgactaaccgttgcatactatcatagtcaatttcatcgcggtcgttaaacggtgtcacaatcgcggtgattaattctgctctttgcatttaaaaaccccctgagcgcgagccggcgcggttagaagtcggagtgtaagcggcttaagcgtgatggcccggtcctggccattgcgcttaaggtccttacacgtagacttctgggctggcgaacgcattatgttaaatccaactggcaagccatcatcaaaaaatccgtgactgcccttgcacactatcaatcaagaccctcaagccgcttccgccatccgatgcgtcagaaaatgaatgatagccgtcacacctggcgctagagctgcttcatctggtgaaaagtcagcggcgtgcaactgcgaatccggatcattcacgcctagccaaaacatggtgccaggaattttgtttaatagataaccaaagtcctcaccggtcatgactggatcggttggcacaaaggtcacggctgggtcggcttgcatgaaatcaatgaaatcttttgtcaggtgcggattattttcgacgggataataaccgccttgattcaaatcgactttgacttcgcagttgaaactggccgcgatgccttgaccgatatcccgaattcgctgttgcaagaaattaatttgcttttgcgtgaagccgcgcaaggtgccttctagatgggcgctaccggcaatcacgttgcggatggttcctgcgcgcatgaggccgaatgtgatcacggcgctatcggtggggccgacattgcgagcgacaaccgtttggatttggctgatgaaactggccgctgcgacgatcatatcgttagcattttgcggtagcgctgcatgaccgcttttaccgattaaatcaacgttaatctcagtggttccggcaaaaagcgttccgagccgcgtgctaatcgtaccagcaggcaggtcaggccgatcatgcagaccataaaattcatcaatctgccactcaccggtgaaagcgcccatgtcacaagcgagtttgccgccattcttgctttcttcggccggctggaagaagaaaatcagatgatcctttggctgatgaatggaaaaataactgagaacgccaagtgccacggtcatatgcatatcgtgaccacatgcatgcgcaatccccggatgatgcgaggcgaacggcaaaccggttgcttcggtgaccggtaacgcatccatatcggcgcgataaccgatcgtgcgttgcggatcggagccagtgactttgactagaatggcggttggcaacttcggtaaggtgcggatggtgagaaaagtctgcggaaaactttggatggttttgagcaggaaggcgtgggtttctttttcctgcagcgctaattccgggatttggtggagctggcggcgaatagcaatgagttcggcttccttcattaaatgtcacaactttctgagttcatcaagcagcactgtcttagcttcggtttgatcgttgacttttttaatcaccttggctgggaccccggcgacgactgtatgagcaggaacatcattaatgacgacggctcccgcagcaatgacagccccttcgcccacggttacgccttcaagcacaacggcattggcaccggtcatcacgtgatcaccgattgtcaccggcttagctgacggcggttccaccacgccggcaagcactgtgcccgcgccgatatggcaatgtttgccgacaatggcgcggccgccaagcacggcccccatgtcaatcatggttccggcaccgatttccgcgccgatgttaataatcgcgcccatcatgatcaccgcgttgtcaccaatcagcacctgatcgcgaatgatcgcaccaggctcgatacgggcattggttgttttgatgtccaataatggcaccccggtgttacgaccggctgcctcgacatagtaatcatccagtttagcggtttttaaaacgggttggatctctgtccagtcaccgatgacagtgcccgtgtgtttgccaataaatgcatgaacgcttttaggaaaatgcaagtcggctaatttgcctttgagatacactttgaccggggtggttttcttgctgtttgcgatggttgaaatgattttttcggtatcgagttgtgccatgatggcctcctatttttttgcggcagtagtggcggttgatgtcggcgctggttgacttggggcggtgtagtgctgatcgtgttggatcaaatcggcgtaagtttcacgcgtgaccactagctgtgcttggccatcttcgacaaaaacaacggctggacgcgggttgcgattgtagttggacgccattgagtagccatatgcgccagtgtcgaacacggcaaccacatcgccgggctgtgtggctggcagcggggcatcgtcaatcaaaatgtcgccggattcacaatactttccgactaaatggacatgttcggtgggctgggcagtcgggtgattcgcaaccacagcggtgtattgagcctgataaagggcagggcggatattgtcgcccatgccgccatcaaccgcaacataaggccgcaagcccggtacatctttgcggctgccgaccgtatacagactgtagccggcaggaccgacaatcgaacggcccggctcaatccaaacggcaggcaatggccagttgaaaccgtggctttgggtttttaaggtggtcacaatcgcctgcacaaaagcttctggtggtagcggatcatcctgcttggtatacgcaatcccaaaaccgccgccgacattgaggactttaggggtgaagccgaattgctggtgccaatgatcaaggactgtcagcagcttttgggtgacggcttcaaacccggcgacttcaaaaatctgggagccaatgtgggcgtgaatacccagcaaattaagatgatcatccgccagaatacgcttggctgcttcatcggcttgcccgctttcaagatcaaagccaaatttgctgtcggtttggccggtttgatcataagcatgcgtatgagcgctaatccccggtgcacccggatcaagacgttttgcttgcccacagccgcctttagcaactcgtcaagcaggtccaattcgtaaaaattgtcaacgatgatcgtgccaacgccggcgtctaaagcttgttccagttcggctttgcttttgttattaccgtggaagctgactttgtccatagggaagctcgctgcttgagccgtgtataactcgccaccggaaacaacatcgacatgaatggcttcggctttggcgacctcgtacatcgcgatggtagcaaacgccttggaagcgtaactaacggcgtaagcgactcccgccgtttcaaaaacctgcttgaacgcccgaatctgatggcgaatggcgccaacgtcataaacataaagcggtgtttgaaaagtgtgggcaagttgactggcagcaaccccgccaatcgttaattgaccttcgtgatttgtggcaaaattcattcagttcatcctcccgagtgatggcagggcaacggcaaacgaaaagggacccttttgtttggccgcgcgtcaaacaaaaagatcccaacttgcaatctacttgaatgatagcgccccgcttagatacctaagcgacagtacaggatttattcaaccctggcccaacaggctcaccgatcccggatcacccatttcggcaaccgcccctttcaccgaatgtcaccacgaa

SEQ ID NO: 68 - DNA, 2963 bp, LACTOBACILLUS RHAMNOSUS
  MISC_FEATURE (1)...(2963): N = A,T,C OR G
tggctgttttactgttgaatgaaaatcaaacgcaactaaccgcgaaagtgaagcaattggttgttgagttgttgcggcaaggcggtagtgagttagttgctgatgatcgcgatgtacccagcgattatgctcaggagattgtcagtcaaggggttgtggatttaattgtttactggctcaatcaaacgccggtccgctcaccggaatcggtttacagcatctttcgcaccacacgccacctaacgcctgaacagttaacagctcggatataaagaggacgcaaaaaaaccgccgcagaatagcgacggttaatcaagcgtagcggtttggcactatttgtgtagaaactgatgaaacgcggtcatgacagcctcaggcgcatcgatcatcagattatgaccggcgtttgggattacggttgtggtcatgtgtgcgcctttatgggcaaagaccacttgatcctgatagccaacttcattgtcattttcacctaacacaagcgtaactggtgacttaatcaggctggttaagcgtgattcaatcgacagacgataagcatggcggttcttcatggcaacccagaaatcgcggttaaaagttttaagccctggcaggataagttcctgatattgtcgccaggttgaaggattgataacaacattcatgtgttgatagtcggtaaattccggtgactgactggtcactggcgcactaataagatgctttagtgttgcaaccgtacgtgctgttttctccgcgagtacaaccggagcggttaaaaaagcaccggaaaactcgtcaggaaatcgtgcaagcaggcctaatgctagatagccaccgtaagaatggccgacaagataacatggcccttcgctggtcgcctgaatgaaagcatgaacctgtgccaacacatcatcagcagattgcaatgctgacgtggccggtgaatttcccattcccggtaaatccggatagaggcgggcaaaatgccgctcttcgctggtaaaacgtggctcataaaaagctgccatgctgtgtccgtctaaccccatgccatgtaaaaagtagatggttttcccaactccaattttgttgtagtgaaggcctattttagttggcatcgtatagagctccttagtgatcagttatcattgctggggatgaatggttgaatcaaattagccagtgcctcgatgttccgagtctggatatagacggtcccggaaccagtgaaccgattgactaaaccttcaccggtagtanaaccgatgacaccactagccggctggatgctgtaatctagctggctgtcccaggcgacaacatgactgttatccacgacatattcatggctgccatcaagttcgatcggaatgatgtcaccataagctgaaaccagcatcgtaccggtgccatccgtttccatgatgaagaatccgccagtgccgccaaataaagcaccaccgactttttgactggccatgtgataactaacggaagtgtccattgccaaaaacgcaccggtattcaggcgatattgatgattggcatcgagcgtcaattctttgataacgccggggttgccgggcgcaatcgccaattcagcgttagccgccttaccagttgccgttgtgataaaaaagctctcgccactggttatggagcgtccaatcgcactcattaggccgccgagtccgcgtttgccattgctattcatgtggccgcttagttcaaccaagccattgtgatagatcatggagccagattcgatctggatcgtttcatcttgttgtagcgcaatctgcacaaccggaaacgtattgttggccgagatggtatagttcatcattaaagcccctttcttgattgtcttcattgtagcgtattccattgccaaaatgcgttcattttcctctgaaaaagtgagttagtaacttgccggtgacgtgatggcgacccattgtagtgaacctaaatggcaaattcgtcccgcaaaaaaatcagttcagttccggttgacaaaccgtccgttaaccagtagtctttaactaatctatttcttaggaggttctcatcatgatgacaaagctgactcaaggtagccaatcattttatttctggtttttcagacgcgatctgtgagaccagttacctttgagtgagcggtcacacagatcaagcaattgactgtgtggctggaatcaggagaatcattcccatttcgtgccccgcggtcaatcgatgactgcggggcttttattttagtttcaacttactggatgtaaaaagatggagggatttacatggcattagtcgatcgtatgaatcacgaggttcggcaactcaaaccgagcgacattttacaattcaatgcagaaattagcggtattgaagggattgttaagctgacattaggtgaaccggattttccgacgccggagcatgtcaaggcggcgggcatccaatcaatcgaaaatgatgagagccattatacccagagcaaaggcttgccgggattacgagctacggcaagccattatctggcaacgaaatataaaacctcctatgatccggagacgcagattttgatcacagctggggccactggcggtatttattcgagtttaacggctatgttgaacaaaggcgataccgtgattatcccaactccgatttttcctttatacatcccaatcgtgttattaaacggagcaaaaccaatatttatcgacacttcggcggatgggttcattcttaagccagagaaattacaacaggcgattgaagcccaatcgggacacggttaaagcggtgattcttaactacccgactaatccaactggggtgacttataatcgcgcggatctgagcgcattaacccacgtcatcaagcagtatgaaatttttgctttaacgaagagattacctagaattgacctacagtgggacgcatgtttcgatgg

SEQ ID NO: 69 - DNA, 5739 bp, LACTOBACILLUS RHAMNOSUS
tgggtatccgatcgccattttccgacttaggggccaccattctcgacaatttcggggtcaccgggaatcgggtaggtcaatcgtttttgagtctgcttcgctaatgaggctaggatccggtagttgtagttgcaatcaatccggatgatgacgggtagccatctgacggttgtcacttgcttgtcgttcatttgtcgacccgaatccaactaagggggaattttcatcatgagtacacatattgacgctccaaaaggcgccattgcagatgttgttttgttaccgggcgatccattacgcgcacaatatattgccgaacattttttggaaaaggctgtccgctacaatacagtgcgtaatgcctttggttatacgggcacctttgaagggcgacggatctcagttcaagcgacggggatggggattccttcaatttcaatttatgttaatgaacttattcaggattatggcgtcaaaacactgattcgagtggggactgccggtgggatgggtagcgatgttaaggtacgggatgtcattctggtacaaggatcatcgacagacagcagcatcgttttgaatacgtttggggcggggatgtattttgccccaatagccgactttcagcttttgcgtgaggcagcaaatttggcagatgctggggcattgcgctaccatgtgggtaatgtgctcggagaagatcgcttctacaacgatgaaatggatcgtcaaaagctcatcgattacggcgtgttagccaccgaaatggagacccctgcactatatcttctggctgcgaagttccatgcacaggcgttatcaatcctcaccgtctcaaatcacctgatcacgggtgaagaaacaacggctcaagagcgtcagactagctttaatgacatgatcttgaagtaacgcttgaccatgcttttgacctagtgggtgaatatccggatgaggtgctggtcgatactctctatcgcacgcgagataacatcaatctgtgtaagaagctaggcattaaacttaatgggccaaagctgggtcgaaagcccaaacatgtggatccgaaacagcgcaaagccgatgtcagtgcggaaaatcgtcggggtgccattgagcgcaagtttgccttcttgaaaggttcacttgggcttgacttagtgaacaccagaacggctgagtccttggtggtaacggtggatagcgcgattgcattggcaaatatcgacctcctccttaagcttttttctgtaccaatttctattgtggtcgaacagggtggcctgcattatcaaatcaactataaagtgactgaaattcggccagaaaccgcaacctaaatcaccagccactaagtatcaataccacattgatggcgtggatccaaatgaatctaaaattgtttatcatggtaaaacgatcggtaaagtcaacattgcgccaggtacagtcgggcttgtggggtcgattgaatactacaatgatatgaatacggttgtcgctaaagacatttgggatcgccgcgggtttaaatcgtcaacccagtattttcatcctgatggtgcgtttggcccacaggttttttacgatcgtgatggtaagcccaagattgaaattacgcggatgaatgtgaatggcgaattgcgcaacaccatgtacaagctgcttgactatcaaggccgggcatggcgctttgataccgaaaatgaaatgtttgttttcttcatgaatgaactgatgcttaaacattctggcgtcttaattaatgatcggccttcattgattagtgaagttgccgcagttgttggcgcacgtggtaagtggcagtttcttcacagtgcccatacttacaagccagaacaagcaggtggatcgcgtaactatgtcgactatctccaaccactatttgccacgcacatgaatgactttgatggcgtcatggtcccaactgtggagcaaaagcaagaaatcgataagttcttccactttaagcatgtcgtggtggtgccggattcatatgctgaaccgcataaactggtccctgctgaaaaacgtgatcgcaataagattgtttatttgggccgaatttcaccggaaaaagaaccacaagaagccgttaagatttttgcaaaagcgaaaaaagacttaccagacttacatcttgagttttacggttactcatctgatcagtcgcttgataattcactaaaagaactgattaaaaaactggaaattgaagacgccgttcactttaatggctaccaaaacaatgaccagttggcaaaaaagcttggagacgccgcggcagtattaagtacctcttcttcagaagcgttcggcatgaatgtgttgcaggcgatgagttttggcgtgccggtgatcggctatcaagttaaatatggcatgaagttggtggttaaagaaggcatcagcggatacttagtgccaaatggtgaaagccaacaaggtgccaaggcgttggttaagttgttgaccgacaaagataagtgggccgatatgcttgaatcaacctatgaatcatcgcagaagtttaacgctgcggcagcttggcaacagtggcaggctcaacaagcagctgttcctaacgtattctcaaagtaggggagagcttagcatatgatattctttattaattcaaattttaataaaaataattccgggattgaacacgctcaattgaagcgggcaggactctttcgtgatcatcatgtgcctttcaagatgatttttcgcgaatggaatcctcgcttacatgaatacttaaaccataatggggtcagtgatgacgaggctttgaacatgtttgactactaccagaatgccgaacaggttccagctaaaattcttcacgctgaagacattgattttggattcgacaagcttagttacgccaaagagccagataaccaccgctatttggtgacccgaggcaaactttttgtcggccggatcaattactttgaggatgactcggctgaacgcgtcagctcagttgaacaattcgatggttttggaaatttgtatcgggttgacttttatgacttccgcggctttttgtcgctgtcgcagtggtatacgccggataataaggtggggactgaggtttggcataaagttgatgggcggccagttattgagacttttaataaatatgacgccaatcatgcgttcattaagaccggatggcggttgattgaagacaacggtgcggtttatatgttttcgaatatagatgatttgacgcagcatttttacaataatgtgaatgagcaatactggaatgacaaagaagtcaatgtctttattcttgatcggtcacatttgggcgattggcaactcattcacttgcagcggcctgcttatattgtcatgaatttacacaactcacatgcaggcgatgcccaagatccgatgcactcggtcatgaataatttttatgagtacagcttgattcatgctaatgattacgatgcgattgtttcagctaccaataagcaaactcatgatgtgcgcgagcgattccacccaacgtgcaagttgtttaccattccagttggcgttttgccagatgaacagttggctcgaccgcatgttgccatgaccgatcgccagccggcaaaagttctggttacggcgcgggttgcccctgaaaaacaaattgatcacattgttgcagcgattgggattgctaagaaagatgtccctaacatttctttggacgtctatggttatgtcgaccaccgggatgataaccgggcgatgaagcggatcaacgcagcaattgaaaagtatcatttacaaggtgcgatcaagttgcacgattacaccaatgatgtcggagccgttcaacggaatgctcaggtttatgcacttgcatccgtgatggaaggctttaatctgtctttgatggaagcactcagcaacggcatggttggggtcacctatgatgtcaactatggcccgaatgaattagttgttgatggcaaaaatggttttgttgtgccatttggcgatattaaggcgatggccgctaagtttgttgaactattcacccatccggatgaattacagcaaatgtcagaccaagcctatgagttgtcggatcgctattcggaagcgaatgtttggaaggcgtggcaagcgttattagatgatgctaaaaagaaggatattcattacactgaagagatatccgctggtattggcgatcaacgggtaaagaaagcgtaaagctccggttttagatttaaaggaactgctaaagtgctcgttattttagaacgaaacaagtgatcgttattttagaacgaaacactttttaaattcttctcaaaacagtacaattagataaatcaaccttaaatgaaggcgggcgcctgaatgaatgacaaattaaagattattgaattacttaagcaacaagtagcagcgaaaacagctgaactgacgcctaagaatattcagaaaataacgcaagacattcaagatttactgaaacttttaaatgacgttgtagccattgattttgttgacactacttctgaaacgagtccgcaacaagagaatacagcagttgcaaaacctgaatctaatgcggcagttgcgccgatgattacccaaacagcgcctgaaactaaaagtgaaccaaagcagcagacgcaaccgcagcaaccccaacagccaaaaccgtcgcagccaaaatccaatcctgaaccggaaacaccattattatcagagcactggttaaataatcataagtcgtacattggtcgcttccatttagatttgaacggcggccatgtcggcaccattaaagtgtcggaaagtaagttacataaaatgaagaacccaccggaaaatggggactgggtgcgtgccgatgagtatcaggatagcgatagtgttaattacaagattacaacgttgaagcgcgatccgttgccaaccgaaattgtacggttgaagtttttgcctgctgtttttcgtgaagatgtgaagcggtggtatattgagtttcaatcaccggaacacgagacgcggcagcagttgcttttaggcgattatgatgtgatgttgtttaagttgaagccgggagattatattgactacgcttatcggcgcggtcaggaaatcaatggtaagatcatttggcgttacactgattccgcggcggttgcgacccgaatgaaacaacgctatgcaaagtcggcgaatacagacgctgataaaaacactgcaactagtaagcagaaagcaacacaaacagcgaacaagacggtcaagcctgcaaagaggcggcgagctgtccagcaagtctttgccgataaaaccttgctgctggtttgttttgaaaactccgccatgccgcgtaaagtcaagcgccatgttgaagaacgcggtggcaaactcgtgttatcatcacactcggattccggcgcgatgttgaagaaaaaagttcaaaaatctgatgtggtgattgtgacgaccgattttgttggccatagtcaaatgtttgcggctaaggatgaggcgaagcggatcgggaagccgatttggatggcgagaaataccaatgagcgtaatttgctgcagtggtacaaacgacattttcctaatgaaagtaagccatctgcggcgcgcccggaagtctaatgaatgagctagaatcaatcattgtgtaacttaaaactaaaatttattttaaaaaaaaccggcctg

SEQ ID NO: 70 - DNA, 2458 bp, LACTOBACILLUS RHAMNOSUS
tggtggtttgttgaaaaccgaaaaattttggggccccacagccgggtattgggtaccatgcccaaccgtcttattggtatattgcggtgctagtttggcccatggcttcggaccgtctttcaaatttcgcacgccaaaaatcctagggaaagctacacccgagatttttaaaggggttatgaaaggccaagcggagcaaaaggccggtatcgctgttggcaactatccaattgattttgataagatcaaacagattattttaatcgtcttggtgctgtatttgggtagcgcactgtttagtttcttgcagcagttcatcatgactcggatcggattcgccagaaaaaagagcccgagcctgtgattctgccgccacagtcgccgtttacgcttgtggcacggcgaattaatgccttagctgcggaacaaacccatttacgtgagaaagtcgcagtacggcagtccagttttgatcgtctgattgataatttgccactaggcgtcatgttgattgataccaataaggatgtcattttgcataatcatgccatgtcccagcttttgggccatcagattccgcagccgcggcacaattatctggacgatgttaagacttatgcgttggcccggatgattgagcacacttttcgccatgaaaagactcatcatcaggagttgaccgtcctggcaacccaaaagtcggttgatgccagtgtcattcctttaaaccaaggaactagtcgtctccaggtgttggttattttgtacgatgtcacgtatttgcgccaagtcgagaaaatgcagctcgattttgttggcaatgtgagtcatgagctaaagacgccggtgactgctatttccgggtttgccgagacactattaagcggggctaaaaatgatccggcgacgctagataagtttttgaagattattttcgatgaaagtaagcgactgacccagctcatcaatgatattctaacgttgagccggcccgaatcgaatcaaacggtgcaggcacaagtaccacttaagaagttagtcgacgatgcattgcgtaatttagctaaagtgattaaagacaagcagattcgggtggaggtggcaattgcaccagacttacaggttgtgaccgatgagcgcaagttaactcagattgtgcggaatcttttgaacaatgccgtgttttataatcgattagccggacatgtgacgatcacggcccaagtagtcgaagggcacttatcattggcggtcgctgatactggtattgggattcccgagacagagcaggcacggatttttgaacgcttctatcgggttgataaagcgcgcagtcgtcacaatggcggtactggtttgggtcttgcaatcgttagtgagctggtgaaaagtatggatggtcaggttgccgtttcgagtcaagtcggggttggatcgacctttaccgtgacattgccgatcagcaagcgccagcagcaagactgatgacatatttacagaacctttacattcaacgacatgaacatttacacgcaactgttaagatgattggagcttgaaatggaggatttcgtgtgaaaaaaattgtgaccctgttttcgatcgtatttttggcgctgttagcaagtgcatgtggcatcagtcatagttcgaaacagtctggtgaatcaatcaccgcagttggatcaagtgccttgcagcctttggttgaagcggcgggcgaacaatatcagacggaacatctcggcgtgtttatcaacgtccaaggtggcgggagcggtaccggattaagccatatccagcaaggggcggttgatatcggtcaacaagatctttttgctgaagaaaaaccgggcattaaagccaacgccttggtggaccataaagtggctgttgtcgggattgcgccgattgttaatcccaaagtcggtgtgaaaaatgtgtcaatgacgcagttgcaacagatctttttgggtcagatcaccaactggaaacagttaggtggcaagaatgtgccgattgtccttgtcaaccgcgcacaaggttcagggacccgcgcgacttttgaaaaatgggcgcttgaaggcaagcaaccgattgccgctcaggaacaggattccaccgggatggtgcgacaaatcgttggcagtacgccaggggcaatttcttacgtcgctttttcttatgttgataaaaccgtccgcagcttgtctgtagacggcgttgcaccaactgatagtaacgtggcaacgaatcgctggcatatctggtcgtacgaacatatgtatacaaaaggtcggccaagtggtttgaccaaacgatttttgacttacatgatgtcaccggccattcagaagaaactggtccagaaaatgggctacattccgatgactaaaatgaaagtagtgcgtaacgccagtggccagattagtcgtccataagcgagtccagcgtctaa

SEQ ID NO: 71 - DNA, 9655 bp, LACTOBACILLUS RHAMNOSUS
  MISC_FEATURE (1)...(9655): N = A,T,C OR G
ttagcatttttgagtttcacttcttcgcgcaactcatcactaagccgcaccgccgtttcaaacccgacatcggattcgatcagcatttcttcaagatcctcgaaaaaatcttcatcaaccgttcgaaagttggcaaacagtgcattcagcttttcaccaaaactactacggcttttttccaggccttcatcatatttattttcttcaggcgtctccggttcagtaccggtgaacgcttttttaatcgcatcaaaaagtcccattaacttgtcgcctctttctgtgattggtccaaactaacggccataattcgactcacacccgactcctgcatggttaccccatataagacgttggctgcaaccatcgtaccatgacggtgagtaatgacaataaactgagttgcactggcataatggcgtaggaattcgccaaaccggttcacattaacgtcatccagtgaggcttcaacttcatccagaatggaaaatggcaccggccgcactttgagaatcgcaaataacaacacgattgccgtcaatgcccgttcgcctccagacaacagcgataggcgggttaacttcttgccaggcggctgtgcagaaatctcaatgcccgtcgtcaacagatcatccggattggtcaggctcaaatgcgcgtgaccgccaccaaacatctgcgggaagatagcttcaaatgcactatttgtctgatcaaacatggctttaaatctggttttgaccgtttcatccaattcgtgcattgtagcgactagctgttgtttagccgctaaaagatcatcctgctgcttagtgagaaattcgtaccgttcattaacttctttaaattggtcaatcgcatttaaattaaccggacctaattcatctattcctcgcttcaacagtttcaatttgctcttaagctcaggaatcggggcatgatccgccgcaactgctgctttagctgcttcataagttaactgataatcttcagccaaagtattcagccgcgaatccagtcccagtttcacgcgattaagcgccactgcttgctgttcagaagtcgccatcgcctgatgctgctgatcataagtggtcgtgatcctggctgaaatgtcgcttaattttccgcgattagccgctttttcctgcgtcagcttagtttgatcggctttaagctgcgtcagttcttttttcaagctggcaattgttgcggtccggctttccttttctgcggcagtttccttggcggttgccgtaatgtgcgcaattcgttgttgaaactctgttgactgggtttgcgcatcgatcgcttgcgcctgccattgctgctgctgatcatggagcgtttgcagatcattcgcgatgacggctaacttggtctttaaaccattaacggctgctgcttgcttagaacttgagtcagctgcagcaacagcggcttccttaagctgatcaatcttggcctgcgcatcggcaatttctttggcaatcttttgacctgcttgatgcaaatcagccaatttggtactcaaatcagcctgtgcggtattggcctgttgcgcggctgccaattgccgctgcgcctgccgcaacgtctcagcttgggcattatgctgactggtaatggcagtaagatcggctgctaatgcttgcgcttgagcagtggcagtttgccaggcttcctgagccgcgttttcctgtttcgtcaaggtcgtcaagtcagcttgcttttgcttcaaatctgcaactagatcctgcaattgcgttttgagatggcgcgcttcttgattacgcgccagtggtgatgcttgccggccttgcttaacctggccacccgtcagcgagccgcctgggtttaaaatatccccagcggttgtgacgatgcgataccgatgatgtgttgagttggcaataacaatcgcatgtggcaaggtgtccacaattaacacactacccagcaagttcgccatcacggctttcaaatcagctggatactgtgccagttgcaaccctgttcctaaaaagccgtctgcactttcaactaactgcaaaaccgcacttggtaattcccgcggccgcatcaccgcagccggcaggaaggtcgcccgaccagcgcgttgttgtttcaaaagactgatggcgcgttgtgcggctgcctcatcacgcgtcacaatggcctgcaaattactgcctaacgctaaatcaaacgcttgttggtaagcagatggcacctcaagtaattccgcaaccgctccgatgacacctggtaaggaagctttatgttttaacactacacgcacaccattataaaagccggcataatcttcatttaattcggacaaggtttcgtatcgagcccgcgcgcgctgataagtcgccatctcatcttgataagtccgttgctgatcagttcgtactttttgaatttgtgtcagcttgtctttggcttcttgtgccgccgcttgttgttgatcgactttggtttgaagctgctgctgttgattcaatagtgtattaactttgggcttcctgatcctgagcctgtttactcagctcataaattcgacgatcatgagcgggcatttttactccccgccagttggttaatttttttgtaaaacggcctgcgcatttttgtattccgcctggggcttttaacaaatcaatgtaatgattctgcaccggtttccaattgccgattaatggctgccggatcttgggctgggcttgcttttgttgggccaattgcgttttgagctcaaagctgtttggcttgagccgtttttgcttgcttagccaaatccgctagccgctggttggcttcggttaacgattgctgcgtatgggccagacgttctttcaaatcagccagagtcgttgctgcattagccgaccgttcactggataaattagcctcaccgctgagattctccagtttcatcgaacgacttaagacttgatcattaaggtggttcagctgttcttcatactggtgatcaaccgcactcagctgttcggattgatgctccaagtccttaaccttagccgtcaacgccgcaattgttgctttggtaaccttggcctcaccttgtgttttctcctgttcagccgctagctgctcaatttcaagtgccaacaaggtttgatggattcggtgataatcagctgattgctgttggtaatccttggccaacgaggcttgttcccgcaacggttcaacctgatgtttcaactcgacaataatatcgttgatccgcgccagattgtcgtcgttgttagctaactcgcgctctgctttggttttttgctgcttatatttataaacgccagcggcttcttcaatgatgccccggcgttcttctggtttgctattaaaaatggcttcaacccggccttgcgaaataaatgaaaaactttcgcgtcccaagccggaatccataaacagatccacaatgtctttcagtcgcacatcctggttatttaataaaaactccgaagtgccgtcgcggtatagtcgccgcgtcactgaaacttctgccggttgatttttaagataaccatcactgttgtcaaaagtcattgtgactgctgcccgatttaaagcaggacgactatccgtacctgcaaagataacatcacccattcgttcgcctcgcaaactcttggcactctgttcacccagcgcccagcgaatcgcctcggtgatgttacttttcccgcttccatttggcccgacaattccggttaagccggaaacaaaatcaatttcggttttatctgcaaatgatttgaagccattaatgatcaaacgctttaattccatgatgactccattctaaatcttactttttaagacgggccaaagccgccttagctgcagcttgctccgctgcttttttgttcttgccaaaccccgtgcccaaaacgtggccttcaacttcaacatcaacgtgaaattgacgctcatgcgcgggtcctttttcgtctaacaggtgataaacaatcgcgacatcaccattttgctgcaaggtctcctgcaaggccgttttatgatcctgatcggccgaaaactcacccgcatcgattttaggaaaaataatccgcttggcaaacttaatattagcttctcgtccttgatcgaggtacaaggcaccattgaaagcttcaaacaaatcttcaagcagcgtcaaccgttgtcgggcaccggctttttcctcgcctttacctaatttaatataacgatcaaaatgagcttctttcgaaaaagcagaaaatgccgcggtttgcactgccgctgcccgaattcgggtcaaatcgccttccggtttatccggaaatttacggtacaaatagtctgaaaccgttaattcgagcacggcatcacctaaaaattcaagtcgttcgttatcttttagtcctaattctttatgttcattgacatacgaagaatgcgtgaatgcttcatccagtaagctgagatcatgaaactcaatcccatagcgttgacgcaattcgctcacaaactctgaggcaaccatgaagagccctcctttttatcgcactatctaattatactagagcgcaccaaaaaagacacctgcgattgcagatgccttaatggtttaacttttaaaccgaattactttgttgcacggctattacttgtaaccgtcattttactccagttcaggtacttcgctgaagcatagtcaacactcgcattcttcacacgtttattaacagggaagatttcctgacgataaagcgtagggatgacaaatgcttcatcgttagcatatttctgccatgccttcaaagccttagcacggtaggcaggatccattgctttttgactatcaatatcattcagcaacttggtgtttttagcagaaacgaaccgagtgtagttaaacggtgctttctgtgagaacaagtccattggtgaaggatcagaagagaggctccaagcagcagcataaacatcaatacccttggaatcattttgaaccttgtcatagaaggaattaaactcgattggacgaccggttgtcagcttgacgcgcagaccgatcttcttccactgctggatataatcctgtgccaatggttgcgccgttgaaccgccagccatggttgcaaagtaaatcgttaacttcttgcctttaggatcggttcgatagccatctttgcccttcttataacctgctttatccagcaagctattagccttgtcaatgttcaaatcatagccatcgatatcagcgtgaacatctttaccaaaaacaggtgggatcaatgtcgttgcacgagaccgcgtaccgttatagaacttggccgcgacttgatcgttgttcaacgcatagcccattgcctgacgaagactcttgttggccatcttcgaatttggatcataaacgttttcgctcttcttatcatcccatttaccgagtttgaaaccaaggtaattataagcaaggctttgatgacccagattcgtgtaaccactaatgttcttccagtcactataactgtcggaaggcatgccataaacgatatcatacttgtggttctttaaagctgaggtgattgaagcagatgaaacattttcaaatgtaatctttgaaagactcggcttgcccttccaatagtattggttcggtgtgtattcaacgctttgtccagcgacaactttactgatcttataaggaccaaagaacaatggttgtttacgaaccttatcactggattccagtttgtcaaacgcaacatcatgtaagtaatgatatggcgcagcactttcaaggaagtacccgttcccagaagtgttaaatgacggcttcatctgcttaaagtgaatcaccatggtattaccattatcacccttaggcatcgttaaaccagaaatagtatccgctttgccgtcatgatactcggtcaacccctcaatattctgaagtgattcggtgtaccgctgactcttagtcgctttgttagccatgatttcataagcataaaccaaatcacgggcaacaactggctgaccatccgaccatttaacatttggtttgatagtcaccgtgatggtcttggcactgttgtcctgtttgattgttgcagcaccattattattaaatttaaatgtgctgttatacgcaaacaagctctcagctgccgggctcatgtagtcattatcatacgcatcagtgtatagttcttcgttaaagacccccttaaatggagagtcattgacgacagccacattgacattaccgcctttgattgcctttgcagtgttattataagaaactgggaacttcacactcttattagctgtacttgagctggagttcgagctcttattgccacaggctaccaaggtgattgataaagcggtagcgagcgtgatcattccgagcacagaacgctttttcatactttttcccccttccgcgtcgtcatcgcgatatgtagcgaagcaacgcttcatgtgagttaaatgatagcataattagaacaaaataaccaatgtttcgtcatactttttacattttttcttcaaaaaaaagagccactctgatttctctgagtagctcttcattattttcaggaaattgtcaatgtttcaaccacgccgttgccgcgaatcggctgcccgtcgcatcgcttgaccgacaaaattaattgataacgacaaagttaacagaaccaatactgctggaaaccaaacccaccagcgattaaaaatcaaatccgggtttgacgcgtatccaatcagtgtccctagactaggagtttccatgggcaaaccaaagcccaagaaagacaacgccgtttcgatcccgatggaactggcaattgtcagcgtcaagtccgtaataatcaaagaactgatatttggcaagacaccggtaaacataattttaaggttcgatgtccctgacgtttttgacgccataacatattcacttcgagcttcagacaacaccagtgaccgcattaatcgcgttgtcgtcatccaataaaaggccgccatgatgagaataatggtgatgacgttgtattgcggaataatagtaaccaaaacaatgatgaccaataaagatggaatgatcatcataaagtcaacaaaccgcatgatgacagcatcaaccaggccgccaaagtacccggagattgttcccagcacaaccccgacaaactcaataatcaaagcaaccgaaatcccgatggtaatcgagttacgggcagcgaagaaaagatacttgaacatatcgcgtccgccttcatcggtaccgagaatatagccgcctgtccccggagccatgtaccgatccaaaatgttgacctcagtagcgccaccaacattaaagagcatcgagccaataaacgcagcaagtataatcgttacagcgagaaaaagcgaaaccacagcaactttatcttttcggaattcattcagaatcaccttgaagttagaaggtgattgttcaattttagtggtatctgtcgccacctcattcgcattattttgcataagctttccccaccttctattcaatccgaatccgcggatccacgatactcatgatgatatcagataacaaattaccaagtaacgtcaagaatccgaatagcaacactaacgatataacgaccggatagtcacggctggtcatagatgatacaaaaagctgtcccattcccggataactaaagaccgtttccaaaataaccgacccgccaagtaacatcgtgatttggttacccataaacgccgcaatcggcaataaggaattacgcaaaatatgtttattgaagataacgcggtctggaaccccttttgatcttgcggttcgaacaaaatcctgatgggtgttatcgataacgccggtccgcagatactgaatcgtactcgatgtcgtgataatcccagaaaccagcgcaggtaaaatcatatgatatatccgatcccagacatagcccaaagtaccgggattataagtggacgacacgctaccaccggtcgggaaccactgaaggaagaacccgaagaaaataaggcccaaaagatagaaaacaaacggcggaaccgccatcaagatgaaggaagcaatcgagatagcagagtcgcgtttgcttccttcataacgacctgcaatcacgcctgcagggattgcaatgacgtatagaataacggttgataacaaagccaaccaaaacgtgttcgccgcacgttcgccgatcaaaccagtcaccgaacgtttgtaaacaaaactttgacctaaatcaccatggaacatattaccgatccacttcacgtactgaatgtaccatggatcatttaatccatactgttgccgtaatgccgccatctgagcagcactttgtccttgcgaaaaattacctgccaatggatcgcccggcatcattttggataggacaaagactaacacactcagtaaaatcaactgcgggatcatgattaagatccggcgtagaattgttttccacattaatcatgcactcccttcatggttgaatctggcagcgcaacgtaatgtgtatcggaaatcttctggagatccaaaacgcggccttctttggaataatatttagattcttcttctttaaaaatgcgttccacttcccggcgatgttccttgttttgcgcgcgatcatcaggattaacatccggaatggctgacaaaagacgcttggtataaatatgttgcgggtgctgataaatgtcttcccgagtaccgatttcgacaaagcgaccacgatgcataatcgccatcttcttacacatatgcttaacaacgcctaagtcatgggaaatgaacaagtaagaaatattatattcttcctgaatccgcttcatgaagttgagaacttgagcttgaaccgacaaatctagcgctgataccggttcatcggcaataatcagcttaggattcgttgccatcgcccgagcaacaccgattcgttgccgctgtccaccagaaaactcatgagggtatttatacaatgcatcgcttggcataccgacaatatcaagtagttcctgaacccgatgccgttcctcatctttagtcagattctgaaaattacgaatcggttcggcgataatgtcctcaattcgtttgcgcggatttaaactagacaaggagtcctgaaaaatcatctgcacgtctttattatattgcagtcgttttcgcacgctgcgtttggtaatatcttcacctttgtagataatcgatccggaagtaaccggttcaagtccgacaatcgctttaccagtcgttgacttacccgagccagattcgccaattaagccatatgtttcgccttgctcaatatcgaaattgataccatcaacggctaacacatgatcagttacacgattaaagaaacccgaacggatcggatagtggatttttaaattttttacctcaatcattgccattattactcaccttttccagccgcttgtttgtcatccgggaaatagaagtccttgtagcaagtacactgaacaaaatgatccggtgcgacttcatgcatggtcggatgttcttcgtgtgccgattccggaatccaggaattgatatcagnctaatggatctcaatggtctcaaacgtgcacgctttca

SEQ ID NO: 72 - DNA, 6220 bp, LACTOBACILLUS RHAMNOSUS
  MISC_FEATURE (1)...(6220): N = A,T,C OR G
atctttttcggcttgcatactcatcctcctttaaaagcataaaacagtcttgaaacttatttttcatcttgattcaacggcgcgaaccaaacttaaaactaatcattgtctgactatccttgcgtcacacttattaatagagacggccaaaatagttgttgccgtctgaataacagcatgcggtattagaaaaattatacaccattttcagaaaaccccaaatcattcacacctaatcatcaatactaatgcggtcaggtggcatcttgtcagctaaaaatgcgttaatggtcggcggatcctgacgaaactgcaattttaacaccgtcagatttcccgcctgtgccaacaaaaccgttcctttaggctgagcttgtaagacaaccccggttagactctgatacatgcggatactacccaaaccaccaatgatagcgggatcagctaaacctttttgccagcttgcaaaacaaagaaacatgacaacaatgaacccgccgctaatcaagtcgtcaaaggaacggctttgttgcaaggttaacaccagactaaacgccgcaactgccagatataaaagaatacgccatactttcggacgcgctcgtatccgtacctgcacaatgtcaaaaatcgtgacgccgacagcaacaatggcaatgagcacgtaagcaatactcaataacgacataaccaacctcctgtttataactatctattctacctgattgttccccaaaaagcagaaaatgccctttgaagaatcgtctcggcagcttattttgagtcaaaaatagacgccagttttctgacgtctaacgattcatttctgaaaatcagcaataagcaggattgatttttccctttaagagccagcttagcgatgatcccactcgccacattgttatcgacacatctggtgtatttccgcagagtcttcaaagacaagccaccgcgccctattgtgcaatattggcggcagcccagtctttaacctttgcaataaaggcggcgaatgcctcacgatcattcaaattcgggaactgaccaagtaagacttgcttagcgcgcttcacgtccggacttggcttttgaagaatcaacaggctcttttctgcttgcttatcggcaaaaaagtcatccggcaaattaagcaagccttggaagtaagttttttccgccagccatgcggttaaaccggcagcttcttcggactggaagacccgacttggtacataaaacatccccaatccgcctggcttcaatactttcatgctttgttcaatgagcaaatgatgcgcatatgaatgaccctttttggctgcagtcgcaaatttctttgcccgttcatctacagggtaatacccccccgggcaaattgggagaccaccacatcaatatccttaaataaaagcccatccaatgcatcttgatgaaacagttcaacgtccaggtgttgcaagctgctgctcatccgggcaaccgccaacaaggcctggtcattatcaacaccgtaacctttttacggtaacgtcacgttctttgtgtagttgattcatcactgcaaacancaagttcccgcttccaactgccaagtccgccactntgagttggctcggctgctgctgatcaaaaacggtcgccataaaggttgcaagactggccatggcatccggtgtgatctgtttattgggttcaatgccatcaactttgatcgctttaaccagcaccagctgcaaggcctgccgtatctcttccggttcatatgttgccaacttcacctgaccaaacaaagcttccagtttcttcttagcttcatcgttaggcaacccatcttcttgcatcacttcaccagaagaaagatcttccccagcttcggtaattgccgcaatatcagtagatttcaactgctgatgcaaaatcgtcgtgctttcatccaaaacatgataaagcttctcaaggtgttcattcgccacaaagacaaccccctaaataaagtgagcgcgacccggcgcgcttagaagtcggagtgtaagcggcctcagacgtgatggccggtctttggccattgcgcttgaggtccttacacgcagacttctgcgccggggagcgcgttatagttgagcgcgacccggcgcggttagggaccggagtgtaagcggccttggtcgtgatggccggtctttggccattgcgaccaaggtccttacatgcaggtccctgcgccggggagcgcgttatgatcgagcgcgacccagcgtaggattcaagcgtctgacaccacagcatccacccattttccaaccaacacagcgattctcacatcatcaaaaggagtttttgcatatggcgacatctattacggcttatgacacaattgcagccatctcgacaccacctggcgaaggggcgattagtattgttcgtttaagtggcgaaacggctgttgccactgccaataaggtttttaaaggcaaaaacctcacccaagttaaaagtcataccattcattacggtcatattgtcgatcccgaaaccggcgatttgattgatgaagtcatggtcagcgttatgctggcgccaaagacgttcacgcgtgaagatgttgtggaaattaattgtcatggcgggatcgtggcgaccaatcggattctgcaattattgcttggcgaaggggcgcgtatggctgagccgggggaattcaccaagcgcgcctttttaaatggccgcatcgacttgaccgaagcagaatcggtgatggatctgatccgggcaaaaacggatcgcgctatgcaggtggccgtcaatcagctcgacgggaacctgcaccatttgatcaaacagctgcggcaggaaattctcgaagtgttggctcaagtcgaagttaatatcgactatccggaatacgatacggatgaaatgacaactaaaatgcttttggaaaaggcccaaaccgtcaaaaaggcgattgaacagctcctaactactgccagccaaggaaaagtgttgcgtgaaggcttggctactgccattgtcggccggccaaatgttggaaaaagctcgttattgaatcacatgttgcatgaagacaaagcgattgtgaccgatgttgccggaacgacgcgcgatgtccttgaagaatacgtcaatgttcgcggggttccgttgaagcttgttgacacagccggaattcacgacaccaccgataaagtcgaaaaaatcggcgtggaacgttctcggcaggccattacgcaggcagatctgattttactggttttggatcaaagcgagccgctgacaacggaagacaagcagctgcttgcggcaacggctgataagaaacggatcatcgtgttgaacaaacaggatttgcctgcgcgtttagacacgacggcgttgctgcaattggttgatgccgatgaaatcatcaaaaccgccattccaactagtgatggcatggatgcactggatgagcgaattgccaaactcttctttggcggcattgaaaatagtcagggaacagtcatggtctccaacgcgcgccaaatcggcttattgcggcaagctagcaaaagcctggatgcggtcatggccgggattcatgccgggatgccaattgatttggtgcaaattgatatgaccgcggcatgggacaagcttggcgaaattaccggcgaaagtgccccagatgaattaattacccaactattcagtcagttctgtctgggtaagtagcgcatgagcgtgtgaaaaacagatgcttggaggaaaacagatgcctgaagtaaagaaatttgaagccggcacttatgatgtcatcgttgtcggtgctggtcacgctggttgtgaagcggccttggctgcagcacgcatgggcgaaaagacattattactgacgatcagcctggaaatgttggcatttatgccatgtaatcccagcttaggcggtccggccaaaggaattgtggtccgtgaaattgatgccctcggcggtgaaatggggaagaatattgatcggacctacatccagatgcgcatgctcaacacgggtaaaggtccggcagtgcgcgcattacgtgcccaagcagataaagcggcctatcaccgcagtatgaaacacgtcattgaagatacgccgcatttggacttacggcagggactcgctaccgaagtgctggtcgaagatggtaaggcagtcggcatcgtggctgctaccggggccatttatcgcgccaagagtattgtgctaacagctggcaccagttcccgcggtaaaattattatcggcgaactcatgtatagttccggccctaacaatagtctgccaagcattaagctctctgaaaatctggagcagctgggctttaagctgcgccgcttcaaaaccggaactccgccgcgtgttaatggcaatacgattgacttttccaaaaccgaagaacaaccaggcgataaaacaccgaatcattttagttttacaacgccggattcggtttatctcaaagatcagttgagttgttggatgacgtacaccaacgcgacgactcatcagattattcgggagaatctggatcgcgcgccgatgttttccggcgtgattaagggagtcgggccgcgttactgtccatccattgaagataaaattgttcgctttgctgataagccgcggcatcaattattcttggaacctgaaggccgcgacacctcggaatattatgtgggggacttttcaacgtccatgcctgaggaaatccagttgaaaatgctgcacagtgtcgcgggattggaacatgccgaactcatgcgcgccggttatgccatcgagtatgacgtcatcgagccatggcagttgaaagcaacgttggaaactaaggttgtggagaatttgtataccgccggacaaatgaacggtaccagtggttatgaagaagctgccggtcagggaattgtggccgggattaatgctgcccgccgcgctcaaggcaaaggacccttcacgttgaagcgttcagatgcttatattggcgtgatgatagatgatctcgtgacaaaaggaacgaatgaaccgtatcgtttgttaaccagccgcgccgagtatcggttgttactgcgtcatgacaatgcggatctgcgcttaacgccaatgggacatgaacttggcctgattagtgatcaacgctatgctgtctttttggctaagcgtcaagccattaccgatgaattagcgcgccttgagcacacccgcctgaagcccaaggatgtcaacccgtggcttgaagctcatcattttgcctcccttaaagatggggtcttagccagtgacttcttgaagcgtccggaaatcaattatcagacgctagaacagttcttaccggaaaacccaaccttggatcatcgggtgattgaacaggttgagatccaaatcaaatacgccggctacattgccaaagaagaagccaagtgtgccaagttgaagcggcttgaaggcaaaaagattccggcacgtatcaactacgaagcaatcaatggcttagcaaccgaggcacggcaaaagctggttaagattcaaccggaaaccattgcccaagcaagccgaatcagtggcgttaatccggctgatgtcgctattttgtccgtgtatattgaacagggacgaattagtaaggtggcacagtaacgggttgctggaaaaggctggaacataacttgtggctttaaaataaagacgtactatttttcaaattccaaatgaaaaatagtacgtccttttattttgttattagtgtcatcagactttaaagaataccagtgtcaaggaggctatctctgaccgagttttatgtcgccatcctagctgtcctgagattatttaaaaagtaatttacactatgattgcagtctattcatcgaaagttgatgatgaaacgagagtcaaaatagaggaagctaaaattagcatgggtacgataaagtcaattccagggattaatttaaacatgccagctaacatatatagaattagaaaaacaacaccaatccatatgattattttggccattttttctccagtcacaatcatgacaatatcctcctcgtataactagcattgcttgccaacttggccaatcctataatcgaggacaaaaccaaaattttatacaatcaaacacggtagccataatgataagtggagcaatgccacctaactgttaatcagcaagaa

SEQ ID NO: 73 - DNA, 1943 bp, LACTOBACILLUS RHAMNOSUS
tttagccgtcacttgatcccgaatcgagtgaaagggtttgcattgttattgattaattgttatactcataatcgtaaagaacttacaaaatgtaagtaataatggaggcaagtgtcatgacagaaaaaatcaatgctgcagacgcaatgatcaaggtgttagaagactggggaattcataatatttatggattgccgggcggatcgtttgatagcaccatgaacgcgctttataatcggcgccacaccattaattacgtgcaggttcgccatgaagaagtgggcgcattggctgcggctggtgaagcaaaggtaacaggacgcattggggccacgtttgggtcagcaggtcctggtgccgttcatctgttaaacggcttatatgatgcgcaatacgatcatgtaccggtattagcattggtaggccaggtgccgactgcagccatgaataccaactattttcaggaaatgaatgaaaacccgatgttcgccgatgtgtcggtttataatcggactgccatgacggctgcacaattgccacacgttgtcgatgaagccatccgtcaagcgtataagtatcaaggcgttgccgttgtgaccattcccaaggatctcggttggcaggagattgatgataattatgtttcatcggccaatctttatcaaaagccgttattgcctgaaccggatcccgagcaagtggcaaccgcttggagcattttaaaggatgccaagaagccgatcctatacgttggtaatggtgcgcgtggcgctcgcgatgaaatcattgcattttcagaaaaaacgcatatcccgatcatcacaaccgcattggcaaaaggggttgtgccagatgattataaggccaacatgggatctgccggtcgggttgcatcaaagccgggggttgaagtagcccgcggtgccgatacggttttgttccttggctctgacttcccattccagccttactttatcgcgccaaatgctaagtatattcaagtcgatattgatgctagcaagtttggacggcggcacactgttgatctggcggtcttagccgatgccaagaaattcatcaaggcattgaccgaaaaagctgatgccgtaccggaaactgcttggtatcgcgctgcagttgctaacaaggcaaactgggctgagtggatgacatcatttgaagacgattcgcaaaccccattgcgcgttgaaccgatcttcaaacttatcaacgagatggccgataaagatgcggttttccaggtggacgtcggtaacgtaacgattaatggcatgcgttatttgaaggccaacgataatcaaatctttacgacttccggctggtacgcaacgatgggctatgctgtacctgctgcaattggcgcccaagctgaattcccggatcggcaagtgtggtcaatttcaggtgacggcgggtttgcgatggtcatgcaggatattatgactcaagtgaagtatcacatgccgattatcaacattgtcctgaccaatgaaagtttaggctttattgaagcagaacaagacgatacccgtcagccgcattcaggggttgatcttattgatgctgattatggcaaggcagctgaagcgatgggcgcacaagggtttgaagttcataatttggacgaactcaaggcggcattcgccaaggccaaggatcgtaaaggcccagttgtcattgacgtgaagatttccgatttacggccaattccggttgaacaactggttttggataagcaaacgcaggatccagaagccgtcgacgcattcgttaagaagtatcatgccgaaaccttgattcctttcggcagttactcgaggatgctgaaaagacaactgcaaacgtttaattgaatcaatttaaaaagcttccgcacccctggtcattgaagggggacggaagctttttgattatgccgatgc

SEQ ID NO: 74 - DNA, 5287 bp, LACTOBACILLUS RHAMNOSUS
ttacgggaaaaagtggtcattggaacgtttggttttcttggccgcgatggcgattgcacgcgcgatactgcggacaattgtcacaaactcaaaattgacagccctattctggatgaccgggcatacgctaaagtgcttagtttggacttgccgcttttgaaggtcgctaagttatctttggcctacgacttgacggaccgacctgatcgcctggcacatgtgctcaaagaattgtttacccaagcagaaaatgcgattgataacggggcgacgattctaatcttgactgaccggccagttgccgataaccagctgacgattccggttcttttagccgtgtcgggattgcacaattatctggtacgtcaaggcaaagggacagcggcatcgctagtggtggatacggccgaagcttgcgaaattcatcattttgcctgcttggtcgggtatggtgcggcggccattcatccttatggcgcatttgccaccttgcgtgagcgcggctatgaccagcaactgccgtcattttgtgctgctgccaccaaaggcattattaagattatgagtcggatggggatttcgacgactgccggctatcaaggagcccagctgtttgaagcggttggactggcggatgatgtcgttgcccaatactttacgggcaccccaagccgaatcggcgggattaacctgaatcagttggaaaatgagtactatcagaagtatcaactggctttcagtcatcatgccattgatgatttaccttcaggcggcagcttccaattcaaggcagatggagaagcgcatctttataaccctaagagcatttaccagttccaaaaagcggtcagaagcggtgattatcaggcctatcagcagtatgcagcggaagtagaacaggaagccaaaacaaccccggtcaccttgcgttcgatgtggacgatcgtaccaagcggccaacaagcggttcctttgagtgaggtcgaaccggtcagtgccattgtgaaacgcttcaaggccggggcgatgagttttggcgccctttcagaagaagcgcatgaaaccattgcgattgcgatgaaccggctgggcgcccgtagcaactcgggtgaaggcggtgaaaatcgcaatcggttccatgtcggggcagatggcgttaaccgcaacagtaagatcaaacaggtttccacggcacgatttggcgtcaataccgagtatctgatgagtgccgaagaaattcagattaaaatggcgcaaggggctaaacccggtgaaggcgggcaactacctgctggcaaggcatatccgtgggtggcgagcattcggggttcgattgccggcgtccagctgatttcaccaccgccgcatcatgatatttactcgattgaagatttggcccagttgatttacgatctcaaacaagtcaatccttatgccaagatcaacgttaagcttgtgtcctcgaccggagttggcacgattgccgccggagtggtgaaagccggcgcggatacggtcgtcatctcaggttatgacggcgggaccggcgctgctccccgaaactccacgcgtgactgtggcttgccgtgggaaatgggattggcagacgcccaccagacgctggcattaaatcgattgcggcagcgaacgactttggaagttgacggtaaactcttaaccgggcgcgacattgcggttgcgatcatgttaggcgccgaagagttcagttttggcaccctgaccatggtagcgctgggatgcgtgatgatgcgaaaatgcaatctcaacacctgtccggtcggcatcgccacccagaatccggaattgcgcaaactctacgccggacgtccggaaaacgtcatgcatatgatgcaatttttagccgaagatctgcgcgaacaaatggcggctttgggttatcgcaccgtagatcaaatggttggacacggagaacacctaaaacctcgctatgtgccatatggcaaggcaaagacattgaattatgaccgaatgttaggcaagacgattccgattgcgcgtaaaaaagccaatccatttaagccaaaatacgactggccggatttggatcggtttgctgaaaccagtcttaaacagcaaaatgccaccttgattgatttaccgattaataatgtggatcgggcggttggaacgcgcctgggcggatggattgccgcgcattttggcaataatgggttgaaaccggggcagctgcagtttaactatcacggtacggcaggccagagttttggggcgtttattacgcaaggattagccatcaaactggtcggggaagctaatgactatgtgggtaaaggactttctggcggccggttgattgtggcggcaccagaacaggcgcgtgaactttatacgcattcaccgattgtcggcaatgttgcatgctttggggcaacgggcggtgaggcttacttcaacgggcgggccggtgaacgtttctgtgtccgtaattccggggcacaagtggtcgttgaaggcgtcggcaataacggctgcgaatatatgaccggtggggttgccgtcattttagggcgcacagggcgcaattttgcggccgggatgaccggtggcgttgcgtatgtttacgactgggcacatgactttgccaaaaattgcagtcaggagctcgtggacttgtaccggctagatgaagcaggcgatgatagtgtgctgctggatttattgaaaaagcatgtgcaatatacacaatccgagacggccgaaatgattttgacacactgggaaaccgagaaaacaaagttcgtgaaagtttatccgcgtgattatcataagatgcgcgatctcattcaaaagtttaccaagcccgagttgtctgaagaacaggtcattgagcaggcttttgacacggcgatgggcaatggacactagccgatgattttgataaaagcacgactaaagaagtacctacgaatgatatgaggagggcaacgtgatggcagatcccaaaggctttttgaagtatcagcgcaaagataatcccatgcgtccaattatgcagcgggtcaaggattttgatgcgttggaactggacgtcagcatggaggaacgacgtaaacaggcagcgcggtgtatgaattgtggcattccattttgtcatcatggtgtcttttatggtggcggtcgcgcggtcagcgggtgtcccaatgacaatctgattcccgaatggaacgatctggtttaccgtgcggaagacaagcgggcgtttgaacggttgagtcgctccaacatgttaccggatatgacaggacgcgtttgtccggcaccctgtgaagtttcctgcgttcaagcacttaacggtcccggcgttaccattcgtaacaatgaaaagtacatcatcgagcaggcgttcaaaaatggctgggttattgcatccggaaagccgctgcaacgtaccgggaaaaaagtggcggtcatcggtagtgggccggctggcatttccgcagcatggcggcttaatcagttaggccattccgtgacaatatttgagcgggatgatcgcttcggtggctttttgatgtacggcattcccaacatgaagctgccaaagactgttgtacagcggcgtatcgaaacgctgaagcaagtcgggattgaattagttgccaatacggaagtcggtaaagatatttccgcggatgaactcaagcggcaattcgaccgggttattgtttgcacaggtgctcgccaggctcgtgagttacaagttccggggcgcgagttaggcggtattgttcaggcagttgattttctcaagacagcaactcagacggtcctcaaagatggcacccaagcgaatacccaattgaaaggtaaacgcgtcttggttctcggtggcggggacacgggcaatgattgcattgcaaccgcgattcgccaaggttgtgccggcgtgacgcaacttgaaatcaccccagcgttaccacccaagcgtcctgctggcaatcagtggccagagtggcccatgacgttaaaaaccggttatggccagaaggaggcaaaagcgctttttggcggtgatgtgaccacctatgccgctacggtgactgctttctttggcgagcatggtcaagtgagtgaagccgagattagccaagtcgatcattttaaaccgattgcgggaacggagaagaaagtcaaagttgatctggtggtgctggccatgggctttaccggtccggaagctgatgtttttgatgcatttgggatcactgccaagaatgctaacttcacaaccaatgatacccagatctatgttgctggcgattgtcgccgcggccccagcttggttatttgggggattcacgaaggccgcatgtgtgcggaaaaagtcgatgcgtccttgcaaacattggcaagtgaagcgttataggttggcggtttagcctttgaaaaaagtcccctgtggcaacgaataagttgctacagaggacttttttgataggcatcttttaatgaattgaaaccggcgttcctgttgggatatgttcataaatccatttggcatcagaaatactcagccgcacgcacccgtgtgatcccggctttttacccaactttgctgcttcggattgaatgtagttgccgttgatatctgtcggtacggaatgaaaaagataggtaccgtgtaagtaaaaactggtgtaataatgtgcacccatttgctcgttaggattaaagaattcataaccgcgctcatcctgaatggtaaagtcaccatgcggggtcgcgtcgtcaatgcccgtggatgcatacattgtataaagcgttttgctgccatctttaataaatacccgctgctttttcaagtttacatgcaaagagaggttgggatgcttggagacgtcaggataaggccgactttcggaaggtgctttccagtcaatcttcttaggcgtaacccgagtaatttcagcagcggtgtaactcggcgtgtggttagtcttggcgagttttgtgaccgatgcatagcttgacgctgtcgaagctgactctttagcatgttgtccggtaaagactgcgatcaaacacaccgttatgaagacagcaatgaaaagcaggcgattccggtactttggtttcagatgatgtgaatgaaggtaatgcatcatcgcggcaagatgatgcatcagttcggttattcgtttcacatgtagcatcctttctattcgcacttgatgcatttgcagcaataaaaataaaacaacttcactgttcactgtattataaa

SEQ ID NO: 75 - DNA, 2121 bp, LACTOBACILLUS RHAMNOSUS
tttatccgaccttggttttaggtggcaccttgaaggctttaccaaaagaagtcaccgataactttaaagaattatttgcgacgttgccaaaattgggcttgaacgaatgggtatcaaccccttcttttgtcgaaattgcgttacttgatcgagttcctgatttaagcgatgctgtggttgcaagcctgccatcttccccacccattacaaatgttcatcaggaggtaaacaatgcgcgtgtcaaaatcaagtcattatgaatttaacaatgaaatgtttagcgccatcacccatgcgtttgcacttggcttagccgtaaccggcaccattgcgttaggcattaaaggcgtcaatagcggcagtcaagtcgaacttttcagtcttatcggttttggcgtttcgctcatgttgctttacaccgcctcgactgcttttcatggtttttattttagcaaggcgcgccatgttttgcaggtactcgatcactcaggcgtcttcattctgattgccggctcctacctgccatattgtttggtcgctattggcgggaaacttggcatcggtctattaatcgccatctgggcattgtgtctcggcggcattgcctacaaacttttcttcctgaatcgcttcaagcatctggaaacgatgatctacgtggtcctcggctggctttgcttagtcggcatggttccattgtggcatcatttgtgcccggtcggtttttggctgctagtcgctggtggggtggcctatacaggcggggcgatgctttatctgcaaaaaggcatcccctacattcacgttatctggcacctctttgtgattctcggcagcctgtgcatgtacttatctatttatttctatctgtaaaataattaattaaaataaacgacaaaaaatcgcctcttctgtacgagagacgattttttaagtgtacgcaaatatgagtctaaactcacaaccgcaccagctgacaaccaccaattccggtcatcggcttctgcttaagccttcttttgccaaacctcataagtgtgcgtcagcgccggattggtatcttcaacggtgcggctggagactttggtaaaatcatcccagtttaatggaatcattttcgtgtcgccttcaaaactgccagccaaccgtgtcaccaataacgtatcgacatcatctttaaacgctgtaaagacctgcgcaccgccagcaatgaccagttcctgatcgggatgctgcttagcataagcaaaaaccgccgcaacatcatgcacgaccacggcacctggcgcttgatagtcttcctgatgggtcaaaacaacattggttcgctcaggtaaaggacgtttaggaaaactttcataggtgcgccggccaacgaccatgatcttaccaactgtctgcgcccggaaataatgtaaatcatccggtaaatgccatggcaaatgaccatctttgccaattaagccatcgcgatcctgtgcccataaaaatgcggtcattcgagacccctcctttgagtatgcaatccaaagccgaacaaaatggcgccttttgtgtcattggtaaacctgacaaagcaatcagacccttgttatgacttgccgtcttctagcgattaaacggccaccggtgccttaatggccggataaggatcgtaattaagcaacttaatatccttcatgtcaaagtcgaaaatatcatgtttatccggattcaactgtaaagtcggtgccggccgcggcgtgcgactgagctgctctttaatttggtcaagatgattgacgtaaagatgcgcatcgccgaatgtatgaatgaattcgccaacttcaaggccacattcatgcgcgaccagatgcgttaacagcgcataggacgcgatattaaacgggacgccaagaaaaatgtcagccgaacgttggtacaactgcaaagacagcttgccatcattgacataaaactgatagagcgtgtgacaaggcggtagtgccatcgtcgggacatcttccgggttccacgctgacacaatgagccgtcgtgaataggggtgcgttttgatttgctcaataacgtcccccaactggtcgatcgtgtcacccttgctcgtatgccaggcccgccatt

SEQ ID NO: 76 - DNA, 7642 bp, LACTOBACILLUS RHAMNOSUS
tttatttggttcatcgacaatcaagactgctcctaaatatccggttcccattacttacgccggttcacacaatttgaaagacccttatttatcacctgcttttgggaactttaagggcctgcctcccatgctcatccaaacgggtagtcatgagctgctactgagtgacagtacgacggtcgtcaaaaaagcgcgcgctgctcatgttcaggttaagtttgtcgaatttagtggtatgtaccatattttctatatttccaccccacaaattccagaggctcagcgcgcttggcaaaacattacttcctttatggctaagcattcatgaccgttacgctgtataaccagaaaacgtatcaaacgctaaaaaagcgcaaataaaccctgccacctacaatccaactacagtatgttcaaaataaggctattgatggcctcagtttaatcgtccacatttcagtttacgttgggggcaatgatatgtatctttcagacaaaacccacttcagcaaactgctttcattcaccgtgcttctcctcattttggtcgtatgaaaccgcttgcgtttgcgcggatttttggaatctgctatcgtcatcagtgacctgatgctgcatcaggttaattgatagaaacgaaggcaaccttatgacgaattcacctgtttcacaccgtacgcaattagccattttatctgccggtttgctgacttttgtcggtattctggtggaaacttctatgaacgtcacttttccaaccttgatcaaaaccctccatgtatcgttatcgaccgttcagtggctgacctcaggctatcttctgatggtaacgctggtcatgagtaccaccgcttttttattacggcgcttcaacacgcgtttgttattccgggcagccatttgttgtgcgctcgcggggacgctgctgtgtatctgggcaccgaattttccgattctgtttgctggtcggttgctgcaggcacttgctaccggggtttccacgccgttaatgttccaccttatcctgaccacgattcctcaaacacaccttggcatttatgtcggcatggccagcgtggtcacctcgctggcaccggctttaggcccgacatatggcggtttgctaacttactacgcgtcatggcggatgattttctggcttgtcgtgcccatcatcttacttgtctggttcatgggtgaagcaacgattcgggtcaaagcacatccaactgcggatcgttttgatttcctcggattcctcttgctggcgccgggtctcttttcactgatcgaagtgctggatcagtttacggctgccggcgtgaccggtgctttttgggcttatgtcgtcgcgcttataattgccatcatcgggatgggccgccacttaaaacacacccgctcgccgttacttaatttttcgctattcaaaaatgccggcattcgcgcgcgtgcgattaacttcttcatattgcaattcagcaacatcggtattgcatttgtcatcccgatctttgccgaaaacgtcttgcataccaacgcttctgtggctggcttattactattgcccggttcactgatcggggctgcggtttcaccgattggcggtgcgctttacgatcgttttggcgcccgccgcttgctactcaccagtaatgccgcaatgtttgtcggcgccgttttacttggctgcttcactcaccagttgagcattcccttaattgtcggtttttatatcatcttccgaatgggcttcaatctgggctttggcaacaccatgtccgatgccagcaccatggtatccggcccggctaaagcagatattaacgctttgttcaacaccattcagcaatacgccggatcactgggaacagccagcttgtcagccatcatcacgtttcaaaatcgcctatcaccatctggcgccgatgcaaccggcagtcaaattgacttcatgctgctcgcggtactcgccgtgttaacgtttatggttcaatggcggttacacgcttcaaaatgatgtcacccgaatgtttggctaaagttattcatatgtacttacggaacgcatgccatgtaaatcatggattgcgtttttttaatgtcaaaaaaatagatcctttgaggcaaactccctctaggatctcatttttatccgcgtataaatttatatgcttgttgctagcaaggttatcgcctcgtctacacgctaacgttaggcttaacccggcaattctgctaaattttctgttgaacctcatcaacgtgaacaatcagcaggcgggttagccagggaaatttttccttcttggctgcaaacgccgggccttgatcgacaaatcggccagtaccaaacacatggaaaccggcgccgggcccaaccgttccttcaacttccttggaaccaaacgttaaaagaacatggttatccttagcaaagtcgccttcgatactgtgcataccggctgcaggaatatagagttcatcatctttgcggctgacaaaagacatccaggtattgaccacgtgagccgggttgccgttgatggtaacaatcgtaacaggaccttcgtgcttcaacacttcgaggaacttttcattcatcgtctgatcttctttcttttcattcttgatacgaatgtggacgctgctcataggtcgcgcccacgcacgtttctattggcaggataacataaaaaattatgtctaagtatgctcttttttgtgcgatcttgcctttgaacctgtctcgagtcccatcgtcttgtgctataactgatcctcagctgacacgtgtatcgtcaataggctggtactgcttcaaaaactttttctttgaaaccacccgatgattggtgatatctaagtaatcacctgaatagcccatgacatacatgccatacccggcaaatccgccgccgatcgtgccgacagcccctatctttaaattagtgcccagcgatggcttcagaccactcatcaaaatccgcagatgattatccaaccaatacaagtaattcgcttcaaacgcttcacgaacccaatctggctggggcgttgttttgcctatttcccaaatatcagcaggttcacctttgtataaagccttcatcattctcacctcatgactttcgaatgttgactgagagcttttatttctgtctttgctagcaacgccatttaacgctctcaaatacagactacgcaacaatgaacattttcccctttataatacccgcaaatcagcacgcggtgtcatctaacaaataaacgtcgggttttggccgattaacgtcattttagcggttaatgttgctgctttttgccacgccaccatcacttcctaaaaacgcaaaaacgcctggaaatcggactcaaaccgtccccagacatttttcaacgtgttgatcatgattaaaatagattcttcaagcaacggtatttatagaatcggcgccacaccatcaaaggtataactgccatcgatgaccgtcaccttgacgtgatgacgcccggcccgccaagtcggtcaccaaccgtattcgggttgcttggccaacgcagtcaacggcaccacttcctgcatccgcccgtcaacggccagctgcaagcgacttggcgtgtgcttggcgtcccaaagagcacaaaaccggttccttcaacatcaaagtcaacggtagcgcctttttcgccaattgactgcgagcgttcccacgcatgcggaaaacgtgcggcaaagcgttcccattgatcgtcactaaacgttaggctggcatctaagtcatcgcggcgatgtcctaataccgctggtgctgacgtgctcgtgaccgtcaaagcctgaatcaccgtcttgaaatagccggtgccgactttgacttgcccggccaaacccggttgatcacttggatcgtcataagttacataagtctggccatcgacttgcaccgtcacatagcgatctgttgcttcaacaataagttcgtgactcacttcggcatcgaaaaccggcacatcaagtgtggctgccaacgaaccgcgaacataaaagcgtaactttccgccaattgtcagcgtagccacatatggcgccgagaataaactgccttcgaaatcgtccacgctccgcacgccaaggccaatatagttggcactgacagtattttgccgggttgtcgtgtcaaacgtaaacttcaacgcagccgcatagttcaaccaacgaatatcgccaacggtaaagttcggatcggtttgcgtttcccaagccaatgcccgtgactgctcggtaatcttttgttgtaacccgcgtttaccgtcctgctcaacgacttcaaatgcaccatccatatcggttgtatatttcggggtgccgccacgacgcgtgagataatcagccggcatgtcggcatagctgtaatcatcgtggaaaagaacgtgattttccggatcctgctgcagtggctgatcagtcttaacatcaggattaggtaataaggcttgaggctggaaatccgcagtggttgcactgatgatcgcccgcggttcaatcgtgaccgttacattcccattaaccggcgtgagcgtggttgtcttttcgcgatcgtgaattttaccggcatcatcggcccaagtctgccatacgtatagcggtttagttgcagcagctaggttcttaaccgtaatctggtaggtttggggagcactggtgtcgttgattagcatcaccgtgtagtccgtttcatcaggggcaactaacgtcatgacactggcagctccaaacgcttgcgtcagattttcagtacccgccacttcacttaccgtggcactcggaacataccgccagttttttgctgctgtttgatcgcgccatcccgtcacggcaaaatcggtgaagtgatgcatgaccgccaaagctaccgtatcttgctgaaagtaacccgaccacggcgtatccatttcaagtaattgctttcccggatattttgcgccgggatataagccgccaatcgctggttgaaaaatgtataaacttcggcgcgagcgggcataacttttaaccaggcgattggcaacatccaaagcactcataggaccgcctatgccaatgccagttgtatcctgagtcctaagcgtgccgaatgtgaccggcgcaatgccttcactgtaccagacttccttatgcagctgatcggcaatcttcgtaaatggtttgtccgggccgtcatcggtgttgtaatggtagccaactgccggaatcaccgcttgtaactcaggatcgttaagcaacgctgtccccatatcggttccataattttgatctgacgttatcaacttaatcgcatgataatctgctactggaaaacctttagggaaatcagcctgatcggttttcagccggttagcaaaccattttaggtagcgatacatcgggtgtttggtctcgttacggtcaggatcaatataatcaaaaagataaccatatgcctgccaagccgcaatcactgtttgcttgtaatactgatacatggcttcaaaagcttctgtcggcaccttttcatcaggatcatcggacttcacctggcgccaacttggccgtaaaaatccaggctctgcccagcgcaacatgcaggttttcaagtccggctgaatctttttggcatcggcaatgagctgaaaccccatgccccgtgccacattggccggctcgtccgcagcgcgctgaggagctggttcggtgccgcatgatgtattcgaatcgctgccaagttctacttttagcatgcgcattaaagggtgttgtccgccgaataagtgttgcagcacttgctgatagacttgggggtgttcccacttatagtccattaataaccttgatgtattgttgcagcttagaagtccaaaccctttaattgtgttggcttcgttttgctctaactgcaactgactaccatcaatcgtcaacgtatgcatgttattgcatcctcactttcttcttgcccgactaacgattaacaccgctgccggttgccatgaccgcctgcacgtctgcatccgtaatcaaattcagatcgccgctgatcgtcaatttcaacacactggccgaaatcgcataattaatcttggcctgcgcatcaaagtcatggagcgtcgcgtgcatcaagcctgccccaaacgcatcgcctgacgccacgccttccatcacatgcatgtggaaggttggcccttggtatgttttgccatcttcggccaaaagccctgtccaccagctatcttccaccgagtgaatgttccgcacaacactggccacggttttaacattcggccactgcttcatcacctgcaacataccagccttgaaactggcgatctgatcaatcccggtcgccatgttaccatcaaatgccttaatgcctaaggttgcttcaaaatcttcatcattagccaaaacaatcgtgatataaggcataaccttggcaaagaatgcctgagcttctgcaggcgaccacattttaccgcgataattcatgtcgcaaacaacggtaatatcatgtgcagcacagtatttaacggctgattcaatggcagtctgcatatgtttgccaatcgccggggtaattccggagaaataaaaataggccacgtctttaagcagactggcccaatcaaattcatcagcttcagcggtcgcaaacgaactgccgacacgatcgtacacgacattcgtgttgcgcacactggcccctttttcaaagaaataaatccctaaacgcggaccaccgcgcaagatcttatgtgtatctacgcccagaccacgaatggtgttgcgcgcagtgtcgcctaatgcattatcaggcagcttggtgacatactgcgcctcgtcgccaagcaatgccaaagaaaccgccacattagcttcagagccaccataattggcctcgaagccagacgcttgaagaatacgttgatgatcatacggcttcaaccgtagcatcatctcgccgaatgttaatacttttgtcatctgtaagccttcctttcgttgggcacgatcgcgcttacagtgaacaaaatctgacaacagcgtcaccttagtcaggctgatggtttggcgctgcttttccttcaaaatagttaggataggcacttaaaactgccttaacatcgtcgtcaatcgctaacaaatgatccgcaaccaaatgactggccaactcagcatctttagccttgactgcatcgacaattgcctgatgttccgtgataatgttatgccatttcaagccgctaacttccaaccgtaagtatcggtagcgattaaattgcaaattcatttgctgtacccaagcccagacaaactgcttatgatcggccatataaaatatttcatgaaagtcgtgatcaagatcaaaaaaatgatcgtaatcccgagaatgctcataaacaccctgcaacgcaatttgctgttccaatttagcaatttgatctggcgtcatgacatcaactgcgtccgccacaatcgtccgctccaaattgacccgggcaaaccggccttgatacatttcatccagattgatttttgatacataagtaccgctttgaggaatgacattaaatagtccttcccgccgtaagcggataatggcctccc

SEQ ID NO: 77 - DNA, 7269 bp, LACTOBACILLUS RHAMNOSUS
tttttggctacgttacggctcaattgtacttaaatcagacaatatttggacgttgctgtataacgacttaaattaggtcaatgatttcatcccgacagtcatgtataagccatcatttcatgaacttttccaattaagaacatggctctaaaataacggtaagcgatgttctgtatggatatataccgtttgagaaatatattgtgaacagtccatgaaacaaacaattgaagcgtaaaccaattgttgaccgtaaaagctatttaagcctataatgtaaccgaatacaaagcgtactacctgaaagacggcgatcatcgtgagtcagaatgatgtattcaaaaaacgttacagaatcgttttgaatctgttcaatttctggattttaggatatttgcttctgcgctcattgggttttgcagaagatttgccagtgttgaatatcgttatgctagtcattgtgcctgctagttttatcggattcgtaatctatcagtattttaagctagggattaccaagccgcttacattgactttttttgctattcttactcgctatgttgatcgtggtgcttctagaacttctaaaagtcttctaagtactttgcagagagctctgaaacttcggcttgttcggagatacggagcttcttttatttgcatctcaaacacgcttagattggaaaatatttacgcagcactatttaacgacagactcggtttgcgtatcaaccgctgcccgaatcgctcttgtaaactgctcaatcgcagccggggcgttttgcgcttccttggcgacaatgtccacgatggcgctgccgataatgacgccatccgcaatcgacgccatggtttgggcttgttgtggggtatgaataccgaatccgattgctgttggcacatcagtggagcgtttgatttccgcaaccaacgcttttaaaccagtgaaaaattcgtcccgttcaccggtgatgcccacagaggataccacgtagatgaaaccagaggcacttttggcaattttttcgatccgatggccagaagtcggcgtgattaacgggataatatcaatgccatatttttctgcaaacggcacaatttcagcgcgactttcgtatggcagatcggggatcaccagaccgctaacttttagctcggcacaacgcttcaaaaaggcatcgtagccgtacttgaagacgatgtttaagtaagtcagaaacacgatcggcaccgtggtttccttccgcgctgcctcaacgatttcaaaaacggttttggtgcgcacgttggcagcaaatgcgcgcaggtctgcagcttgaattactggcccatccgcaaccggatcagaaaagggaatgcccaattcgacaatatccgcgccgccatgcgcgagggcgacaatgtttttgacagtggtatcgaagtccggatcgtccgcaacgacaaatgggatgaaagctttatgatttttgaagatggcagctaaattactcatcaacgtcaactcctttgtatttggcaatgctggcaacatctttatcgccgcggccggataaggtgcagatgatgatttgatccttggccatggttggggcaattttttcaacgtaagcaatggcgtggcaactttcgaccgccgcgacaatgccttcttgcctagcgatgtatgcaaatgcctgaaccgcttcgtcatcggtgatcccaacatattgggcgcggcctgcttcggcgagggcggcgtgttccgggccaacgccggggtagtcaagaccagcagagatggagtaaaccggatcgatttgtccgtcttcgttttgcatgaataaggatttcatgccgtggaaaataccgacactgccgcgttcgatcgtagcagcggttcgcgccgtatcaacacccttaccagcggcttcaacgccgaccagttgtacagaaggctcatcaatgtatgcggcaaaactgccaatggcgttactgccgccgccgacacaggctacgaccatgtctggcagctgtccctctttagcctgcagttgttgcttggattcaatggaaatgacgctttgaaaatgtttgaccatctccggaaatggtgctggacccacggctgaaccgagcacataaaaggtgtcatcgctgcgactggcccattcctgaagggcagcattgaccgcgtctttaagcaccatcgagccgctggtgacagaatggaccttggcgccgagcaatgtcatgcgataaacatttaacttttggcggtcagtatcttcttttcccatgaaaatttcacattccatgcccatcaaagcggcgatcgtggcggtggcaacaccgtgttggccggcgccggtttcggcaattaaccgggttttgcctagatgcttggcgagtaaggcttgtccgatgacattgttgattttatgggcaccagtgtgattgagatcctcacgtttgagatagatcttggccccgcctaagtcttcggtcatgtttttggcgtaatacagtagcgatggtcgattagcataattgactaacaaatcgttgagttcggctttgaattgcgggtcgtcttttaaagtgttgaaagccgcggtgattttttcgagttcggtcattaaggtttccgggatatactggccgccaaagtcgttgccatagcggccggcgcggtttgtaggttgagcagtttcatttagtgttttcataagtgatttcctcttttgcgttttgagtaaattgatgaattttatgcgcatctttgtgaccggcagtttcaacgccgctggacacgtcaacgatagtagggtggacgacttgaatggcgcgggcaacattttccggcgtcagaccaccggctagaatcaggggtcgtgtgatgtgtggaatagccgctagattgagcagttggccactgccttttccgctgtcgaccattagataatcagccagcgaagttaagtcgattgcttgacgttcaaagacctggatgacttgcaggccagcgtgttgcaactgcttaatttcggttggtgtatttgttcgatgcagctgcgcaatttcaatggcgccggcttgataaattgccagaatgtcatcgaccgattcatgaacgaaaacgccctctggttgaatatcgggatggagtaacttgcgtaaagccactgcctgctccagggtgacgtgatgccgtccggaagcaaaaacgaacccggcgaaatccacttgagcagcattgatggctaaaatatcttcgggatgcattaagccgcagactttcacttttaccatttttcaaatccccctgaatgccgtaattaatttccgcttgtgcttggagcgcatgagggtttcaccgattaagacagcgttgaaaccggctgcggctaacttttcgacatcttgttgcgtttggatcccgctttcggcgataacaggaatcgggtcaggaaccatggcgcgtagtttcagactgtttgtaaaatcaacctgaaaatttttcagattccggttgttaatgccgatgatttttgcgcctgattgcaaagcacgggtcacttcttcggcggtgtaggcttcgacaatggcttgcatgccgagatcctcagcgagttggcggaaggtgcgtaattgttgatcagttaagatggcaacaataagcaaaataatggacgcaccatttgccttggcttcgtaaatcatataaggatcaatcgtaaaatctttacgcaatgtcggcactgagacctgttggctgatcgtctttaaatagcgaagatgaccgttgaagtaatcgggttcggtgaggacggaaatagcatcgacgccggcttgctcgtaagcttgagcaatcgccatataaggaaaattcgccacgatcgttccttttgatggcgaagcttttttgacctcggcgataacgtgtaaaccaggctgctttaagatggtgagaaagtctgattttgtggtggatggttgatgggcaacgatacgtttgagttcagttaaggattggggttgttggtggcgagcaaggcggattctggttgctgcgacgagatcatctaagatcatgccaccacatccttacgtttggcagaaaaggcgcgcaggtgatttaattcttcacgtgccttcccagcgtcaatcgtttctgcagcgagggcaataccgtcttgaatgctcagttccggatgagccagatgcagggcagcaccggcgtttagtaagacaatgtcacgttgcggtccctgcttgccggcgagagtattttgcgtgatttgcgcattttcttcaggcgtgccaccgaccagatcggcgcgctgactgcgattgaagccgaattgttctggcgtcaccgtgtattgggtgagctggccggcgtttagttcaaccacagctgtttccgcggcagttgtcatttcatcaaggccgtcacgaccatgaacaaccagcgcattggtgacgccgagctttttcaggacgttggctaacggctccagcaaagtttcatcgtagacaccaagcagttggcgcgttgggtgagccggatttgccagcggaccgagaatgttgaaaatagttcggaaaccaagctgctttctaacgggagcgacatacttcatcgacttgtgatattcctgcgcgaacagaaaagccaaattgttttcctgcaggctttgataactgatggccggcgtttcgttgatatccaagcccaaagcttcaagtacatcggcggcaccgctctttgatgaagctgcgcggttaccgtgcttggcaacaggcgttccggtcgccgcaacaacaatggcgctggtggtagaaatattaaaggtgttggcatgatcgccaccggtcccgacaatttccaaaacatccttggtttccggaaaagcgagtgcgtgccgccgcatagaagctgccgcaccggcaatttcgtcaatcgtcggtcgcttagcagttagcgcggttagtagactggcagtttgcacttcagacgcctcgccgttcataatttcatccaaaacagcttggctttcttcaaacgttaaatcttcgtggttgacgactttttcaatagcttgtttaatcatggtgatccctccaaatttggttgttatagcgacttggttgttgagaaaaaaggctaagtgaaaatggccatcgtttgatttccttggtttgtttcattttcgggggacctcctttgattgttgagatgagtggttgttgctgacatgcttcttcataacgcgcttacagtcgccataacgcgttcgccagtccagaaacctgcatgtaaggaccttaaccgcaatggccaaagaccggccatcacggttaaggccacttacactccggtttctgaccgggctggctcacgctcacaaaaaaaatccgcccataactaaaaattctagttaaggacggatttcccgcggtgccaccttagtttgatcgctcgagtctttgacaaatagactaacttgattgcctaaaaagagtccgattgatcacgcttagcgagggaccaacatccctccgacaactgacgtatgcctgacgtttccccgtactcgcaagctttcgggggaaccctccgtggtccatttaatcatctgcgttcgattgcactctcagcaacggcaactctctgtgcgcgcacaatgatcttgatctccacatcaacggtttttcatggacgaagtattaatgattgatttgtatattagagagtattcataaaaatgtcaacagttttaatctatttttttgaaagtgtctgcagtgtgtattgctctccttggcaagtcgcttaaattgcaccaatcattttcaggaaaaagccaagcatcgggccgtacacacagtaatctgtttcgctcaaaatccgcataatgggagcataggtgccgaccagtggtaaaagtaatgcctggccaaagatcaaaagaaagccatttaccgaggagccaataaccgcaccgcgagcgccaccgtgtgcatcgccgaaaatggcagtagcggcgccggtaaagaaggttggaattaatgcagggaagacgatgatcgggtagtttgtcacgtctaataaaagcattccgatcagtccagtcgttaaactgcacaagaaaccgacaatgactgaagtcggatagttagggaataacaaggggatatccagacccggcttggcattggggataaatttgccggcgatgccatggaatgcgggaatgatttctgatagcatcatgcgcacaccggtgatgataacggtaatccacatgccgaattcaactcccttgagaatggcgaaaacgccaagatcttttccattagacacatgttgcatgagccaattgttgccggcaaataggccaaggaagaagaaaagggcagtcatcacaagtgtcaaagaaatggtcatttcacgtaaaaagttaagttgcttggggatttttaaatgttccaagtcgtgctgcttattcccgaataacttgcccaagatagaggccacaaccaagccagaggagctagagtgtgcgagtgtaaaaccatctgcgcctttgacgggtttgatgaagtaatttacgtaggcacaagacagggtcatataaacgcccaaaatcagggccccaatgattactaatgggatgaacgttaagtgggtgttgtacttgagtaacgcggcaatcattccggcaaagaagaatgaaacgtgtggagaaagatgcacgaatctgaaccttgtcaatcgtgccatcaaaatgttaatcaaaaagccgagcgcaaagatgagtgccatttccgtaccaattttggctaagcttgctgcctgtgtggcgccgatattttcgctccccagtgctttgatgccaaaaatttttgaaatcatttgctgtaacggcaatagggcggtgccaagtgtctgaccgccgacattgatcatggtgaagccgatgaccgccttgatcgtgcttggtaaaattttatcccaagtcttgtgctggacggccattcctaaaatgaccacgagaccaataataaaaatcggctgacttaaaacattgtcgatgatatataaaagagccttcatctcgtcacccagcctctcgcgaatggttcagatccgtgatatgtttcaataattctgattttagatatgctttgtccataagattgtcgattttaatgattggcgtcgtggcttctgataattgatcagcaaaatcggaaatcgtgataagcagatcgtaagcattt

SEQ ID NO: 78 - DNA, 1436 bp, LACTOBACILLUS RHAMNOSUS
tgaggctaggatccggtagttgtagttgcaatcaatccggatgatgacgggtagccatctgacggttgtcacttgcttgtcgttcatttgtcgacccgaatccaactaagggggaattttcatcatgagtacacatattgacgctccaaaaggcgccattgcagatgttgttttgttaccgggcgatccattacgcggcacaatatattgccgaacattttttggaaaaggctgtccgctacaatacagtgcgtaatgcctttggttatacgggcacctttgaagggcgacggatctcagttcaagcgacggggatggggattccttcaatttcaatttatgttaatgaacttattcaggattatggcgtcaaaacactgattcgagtggggactgccggtgggatgggtagcgatgttaaggtacgggatgtcattctggtacaaggatcatcgacagacagcagcatcgttttgaatacgtttggggcggggatgtattttgccccaatagccgactttcagcttttgcgtgaggcagcaaatttggcagatgctggggcattgcgctaccatgtgggtaatgtgctcggagaagatcgcttctacaacgatgaaatggatcgtcaaaagctcatcgattacggcgtgttagccaccgaaatggagacccctgcactatatcttctggctgcgaagttccatgcacaggcgttatcaatcctcaccgtctcaaatcacctgatcacgggtgaagaaacaacggctcaagagcgtcagactagctttaatgacatgatcgggttggcactgggcgtcgctaaaaagattcctgtacgttaaataacgtataagttgaaggcatacctgtgtaaaatgacggtttaaaattttccggaaatagcaaattaatgtgcgaagaagtaggaaacgtgttattctgtatatggtttcttaagaaaaggtaaatgcaaattaaagtgtaaatttagattcgtgcaattattcagtttagaaatggaggagtacatacatggtagattctaagaaagtattgtcagtaacggcaggcttcgttggtgctgccggtctggcggctttagcaaccggagccaataccgtttctgcatcgacagggacggtcagttacaaatccggtgcgaccaccgtatggaatagtccatcatggcaccaagtcaaacgctacgtgacttttggggacacggtgcagctattgggtaaaaccgttgaccaaaatggtgctacttggtataaagttggcgacaatcagtggattccggaattgtatttgaatgttgcgggtaaaactgccacggttgaaacaccgagttcggcagcaagtcaaactgctgtcagccaagcaccggctagtcaggcgcctacaagccaagcaccagcaacccaaacacctgcagc

SEQ ID NO: 79 - DNA, 2448 bp, LACTOBACILLUS RHAMNOSUS
actggcgaagaagttgattggaaggacttctacccgcgctggctcgcgctcaggaggggaataccatggccgaagaagttgaacttacccagccggatgtcatgaagttgtgtaaagcttacatgaaccctgaacacttggcattcgttgaaaaggcctataagtttgccgcttatgttcataaagatcaagttcgcaagtccggcgagccttatattattcatcccattcaggtagcggggattcttgccgaattaaaaatggatcctgaaacagtggcttccggctacctgcatgacgttgtggaagatacaaatatcacgctgggcgatattgaagaagtgtttggccatgatgttgcggtcattgttgatggggtgacgaagcttagcaaagtgacctatgttgcccataaggatgagctagctgaaaaccatcgaaaaatgttgctggcgatggcaaaagacttacgtgtcattatggtgaaactggcagaccgcctacacaatatgcgcacacttcaacatttacgcccggataaacagcggcggattgccaatgaaaccctggagatttatgcgccactagccgaccgcttagggattagcaccatcaaatgggaacttgaagacctatcgctgcgttatcttaacccgcaacagtactatcgaattgcacacttaatgaacagtaagcgcaccgaacgtgaagcttatatccaagaagcaatcgaagaaatcaaaaaggccttagcggatctgcatattaaatatgaaatctatggccgcccaaaacacatctattccatttataaaaaaatgcgcgacaagcataaacagtttgacgaactgtatgatttgttggcaatccgggtcatcaccgaaacgattaaggattgctatgcggttttaggtgcaatccatactaagtggaagccaatgccaggccggtttaaggattacattgcgatgccgaaagccaacttatatcaaagtattcatacgaccgttatcggaccgatgggcaagccgctagaagtccagattcgtaccgaagaaatgcatcacgtggctgaatacggggttgcagcacactgggcttacaaagaaggccagaccagtaaagtccagtacgataaagccggcaaaaaattggatatcttccgcgaaattcttgagctacaggatgaaagtagcgatgccgccgacttcatggaaagtgttaaaggcgatattttcaccgatcgcgtttacgtctttaccccaaaaggtgatgtctacgagcttccaaaaggcagtaatccgcttgattttggctatttaattcatacggaagtcggcaatcatactgttggcgccaaagtgaatggcaaaattgtgccgcttaattacgtgttaaaaaatggcgacatcgtggaaatgctgacggctagcggcagtgcgcctagccgtgattggatcaaattggtgtacacttcgcgcgcccgtaacaagatcaagcgttattttaagcaggccgataaaagcgaaaacgctgaaaaagcccgtgatatgcttgaacatgagctacaagaggaaggctatgtaccaaaagattttatgacccaggaaaacatgaccggactcatgcagcgtctgaactttcaaaccgaagacgaattaatgagttcgattggttacggggaatatacgcctaaagttattgctaaccggctaaccgaaaagttccgtcatgcaaaggctgaaaaggatcgtaaggccaaagaagctgccattttatctaagaaccagaaagtcacaaccgtttccagtgagaaacatcagccacaaacccattccgaagatggtgtggtgattgaaggtgtcgataatctgctggttcatttagcaaagtgctgcatgcctgtacctggggatgcaattgtcggctatgtgacgaaaggccgtggggtcacagttcatcgcgcggattgcccaaatgttcaaagttcacgggaaatgtcgggtcgtttgattgacgttcgctgggaaaacgaagcggtacaaaagcagctctttaatacggatcttgaaatttacggttacaatcgcagtgggctgttaaatgatgtcttacaggtccttaatgcccaaactaaggccttgaacaacatcaatggccgggttgatcacgataaaatggctgatatccacgtcaaagtcggcgtccgcaaccttgcccatttggataaattaatggatgctgttaaaaatgttccggatatttatgaagtgaagcgggcaaatgggtgatgaccgttttatttagacagcacgggtgatcagaaagacacagatctcaatgatcacgatccggtgctgtctttttatgccagcagcattcacaaacaagatttgataaataaaggagaaaagtatatgcgcgcagtggtacaacgcagccttgcag

SEQ ID NO: 80 - DNA, 1807 bp, LACTOBACILLUS RHAMNOSUS
acgcaagattcttacccataaccgccatgccgacaacaccaatttgtggtttatccattaacatggacctcctcattcattcatcatttactcttttcatgttagcagaaaccgcttgggtttaacagtcaacagccgagctagaggcctgtaaattttctttgattattttttgttaattctgcaaccgtcacgaacagagcgccgcacccaaaagtttcacagtcaatcagtcagtttgatcaggtaaccgctttcttaatgagctatacttgttataaaaaggagttccattatgaaagcccccacacaaccaattgttgttcactttccattacgcggcgaatggttggcacccaatacgcctgggtctaaggttccaagccatggttctaacaaattcgggacgcgttatgcgtatgattttattcaggtcaactggcagaaacttggtcgtcctgcctaccgcggtagtttgttgaagtatctattccgcggcattccgattgacgactattattgttatggccagccgatttatgcgccagccaacggtttggttgtccgcgcagaggatcattatcctgaacggaagcggaccagctttttaggcgacttacttcgggcaagaaacgctgcccggcattttgacccaaaaagaaacaacgttcaggcagttgccggaaactttgttatcttacaaatacacgatcatgtttacgccgccttgtgtcatcttcaaacagactctattcaggttgggcgcggacaaacggtccaggcaggtgatttgcttgggcgcgtgggacattccggcaactcatttggcccgcaccttcattttcaactcatgaacaacagtgacattgaagttgcggctggccttccttgtgcatttgccgaatatgagcttttcgccggaaattcatggctaacccaagaaaacgctgttcccagcaaaacagaccgaatttgctttgtgtcacctaagtctggacctttttaaaagggtacgcttctttgtgggccgtgatgaccgtgaagctgtttgcgtcaactacccgtcgctaaagtatcgggcttgtgactcacgctgctcaaccggcagcagtagtgcaaatgcctaacggctcctacttatgtggtcacatctcagatcgtgtttcaacggtctcgggggcagacaactcccgcagatgcatagttttctctacccagtctgcttgtgcgcgtaacacggcttgacaatcccggccagccactggtttcccagttgctggatgttcatggcggctgactggtcgtcattggcatggaagccacagacacagacgtattcatggcgctcgtgatcccgctgctgtttcttgatcacgccacactgtggacagcgttggctggtataaccagcaggcactttcagcacgcggctgccttgcgcagcagctttgtatatcagaaactgttccaactggtaaaacggccaactgacctgttcatagcgtcggtcttgagcaacttttgcggttgcacaacgaacatcagtcagatcttccagcacaaacagggtatttgccccgcaacagtcggcgagtgccttagccgcacgatggttttcgtttgacatccagcggttctctcgctgacggattcgtttcaggacgcgttttgctgatttcgttcctttggcttgaagtttggcccgcaggtacttgtaccgctgccgcttgttgagcgctctggtccctgaccaataggtggtccggccggtctcgtcaaacgcggtggctaaaaaacgcagtcctcg

SEQ ID NO: 81 - protein, 485 aa, LACTOBACILLUS RHAMNOSUS
MVIKQRRGERRGVIIQFNADFVWGAATSGPQAEGTFHKKHENIFDYHYHTRPQDFHHNVGPDVASNFYNDYIADLKLLKRAGVQALRISIQWTRLIDDLEEATVDQAGADYYRRVFAEMHDLGITPYVNLHHFDLPVVLQHQYGGWQSKHVVELYAKFAARCFELFSDQVTHWFTFNEPKVIVDGQYLYQFHYPNIVDGKAAVQVAYNLNLASAKAIAVFRKLNRNPKGTIGTIINLTPVYPASQADNDRAAAHFAELWANDLYMEPAIHGYFPEELVDRLERDGVLWDATPDELDIISANRIDVLGVNYYHPFRVQAPAIDPESLQPWLPDIYFDHYELPGRKMNLDKGWEIYPAALYDIAMNIKDRYDNIPWFVAENGIGVADETRFLKDGVIQDDYRIRFMTEHLQFLNRAIAKGANCHGYFSWTGIDCWSWLNAYKNRYGLIRNDLRTQTKSLKKSGYWFQKVSSTGHVPELAMQSGNKGR

SEQ ID NO: 82 - protein, 411 aa, LACTOBACILLUS RHAMNOSUS
MTLSNFNESLKKYAELAVDIGVAVKPGDTVYVQISVDQAQMARLIVEAAYQRGAAEVQVQWFDDVLKRLDMAHMANERLFNIPAFVKGQFDYWVDHQAKRITVVSSDPDNLAGIDSNRIAKYQEAFAKAYKRLMEAISSMSISWTIIGAASPRWAQKVFPDAATPEEATELLWEAIFKTTRIDQPDPEAAWKAHDQKLREKAAWLNNEQFDQLHYMAPGTDLVVGLPKNHIWEGAGAFNPRGEEFMANMPTEEVFTAPDFRRIDGTVASTKPLSYGGNILEDMHFTFKDGQIVEAHAKQGDDVLQNLLKTPGARSLGEVSLVPDPSPISQSGLIFFNTLFDENASDHMALGQAYPFSVKDGVAMTNEQRAAAGLNQSPTHVDFMMGSAAMNIDGIKPDGTIIPIFRNGDWA

SEQ ID NO: 83 - protein, 448 aa, LACTOBACILLUS RHAMNOSUS
MSAEITSGDLDQFKQDLQATPAANALQKAVMNNGINATAENTDSKVAMTPTFSIELDTGAVSNQKQSGRCWMFAALNTMRHGIQAQFKIKDFELSQNYTFFWDKFEKSNYFYENVLKTADQPLYSRKVAFLLATPQQDGGQWDMLSALIEKYGIVPKSVMPETYSSSKSNELNGLLNLKLRKDAVTLRKLVADKASDADIEAAKQKMLAEDYRIWAYTLGNPPTKFDFEYRDDDKNYHIDRELTPQTFFKKYVGWNLDDYQSIINAPTADKPYKHLYTVEMLGNVVGGREVRHLNLDIDTFKDLAIKQLKAGESVWFGSDVGQSSDRQLGILDTNIYKKDDLFNTDFTMTKAERLDYGESLMTHAMVLTGVDLVDGKPTKWKVENSWGEKVGEKGYFVASDAWFDQFVYQVVISKKYLPAELQDVIKNEYDKPTVLAPWDPMGALASR

SEQ ID NO: 84 - protein, 365 aa, LACTOBACILLUS RHAMNOSUS
MLRNSIAGLPDYVSDSTPERIAKAAGLAKMTRLSFNENPVGTSPKVQAALENWAFSQARNYPDPDALPLRTAVAKRLDIPAEQLLFSSGLDEMIALICRTFLEVGDESLQPWPTYPEYQLQAAIAGATTINAPVIAATGLIDLDALLAHITTKTKVIWVCNPNNPTGTYLPPDQIAQVMKQVPPNILVVVDEAYIDFVNQPEPSTLSLTHQFPNLLVMRTFSKLYGLANFRVGFSIVPKALIPKMQNVRLPYNISGMSQAAALAAWEDQTFTRKVKQQIFAARKQWHQFFDQHQIRHYATQTNFMLYQVNDPQALGTFLKQHGYLVRDSMVPGWIRQSFGTPKQDAEVQQLLLTFLGIKQTSNIS

SEQ ID NO: 85 - protein, 350 aa, LACTOBACILLUS RHAMNOSUS
MPLKSGNTTLKRNEAAMTTYARAHTNIALIKYWGKANKQLMLPATSSISLTLNDFYTDTAVTFDPELNQDQLTLNHQMQSPTAVSRFLDHVRHLAQIDTRARVTSLNHVPTAAGLASSASAFAALALAASRAAGLNLTPTALSRLARRGSGSATRSIFGGAVIWHRGSDDQSSFAEPLTIQPTLPLRMLVVTVSDQKKAVSSRTGMANTVATSPYYQAWVQSNEALISPMITALAENDLTTIGALTELSSMRMHAAIMAEEPPFTYFLPETLRAWQLVQEQRALGIPAFATMDAGPNVKILTTAPYVDVLMTALQPVFGDRILSTRLGPDAQVITKEQFNDTESAITSQG

SEQ ID NO: 86 - protein, 359 aa, LACTOBACILLUS RHAMNOSUS
MRLKQLVAGAITVATLAGVGVSGFAATTVHAADDKASLQAQNDDLLKQVQAANEKSAKLNNEVSNKVLAIQDAEAKIKDSQAKIADFATQLTKANQEVSKRKSNLKDQLISLQKRAGDSVTGNVYFDFILNSDSLTDLVGRSLTVSKLSQASAEALQAVKDSEAKVKNLKAAQANQKNLVATKSQLESDKAKIDGLKADADKAAADAQQTIDANKEKLAAMAADEAAKAEAAQKAVTAVASSTASASSTSASSSTTASSNSLGSSKAASSQAPASAGSSTVSVSGGSIAGNAAKYLGVPYVYGGTSPAGFDCSGLIYYAAKEAGISLPRTSQAQSTLGSYVSVSDLSFLMRRFSEVIRR

SEQ ID NO: 87 - protein, 396 aa, LACTOBACILLUS RHAMNOSUS
  VARIANT (1)...(396): XAA = ANY AMINO ACID
MAEKEHYERTKPHVNIGTIGHVDHGKTTLTAAITKVLSEKGLAQAQDYASIDAAPEEKERGITINTAHVEYETEKRHYAHIDAPGHADYVKNMIXGPAHMAGAILVVAAIDGSMPQTREHILLARQVGVDYIVVFLNKTDLVDDPELIDLVEMXVRELLSEYDYPGDDIPVLRGSALKALEGDPEQEKVIMELMDTIDEYIPTPVRETDKPFLMPVEDVFTITGRGTVASGRIDRGTVKVGDEVEIIGLKPDVLKSTVTGLEMFRKTLDLGEAGDNVGVLLRGINRDQVERGQVLAKPGSIQLHNKFKGEVYILTKEEGGRHTPFFSNYRPQFYFHTTDVTGVIELPDGVEMVMPGDNVTFEVDLIAPVAIEKGTKFTVREGGRTVGAGVVSEILD

SEQ ID NO: 88 - protein, 478 aa, LACTOBACILLUS RHAMNOSUS
LSAFPKDFLWGGAVAAHQFEGGWSADGKGISIADVMTAGDNQTKRRITDGVQPGENYPNHDAIDFYHRYKDDVELFSELGLKCFRTSIAWSRIFPKGDEEQPNEKGLQFYDDLFDDLLAHHIEPVITLSHFEMPYHLVQAYGGWRNRKLIGFFVKFAKVVFDRYKDKVKYWMTFNEINNQVGMLNEWSLFTNSGLIIHPGENKEQAMFQAAHYEAVASALAVQIGHTINSDFKIGCMVAMGPVYPATPNPNDVFKAERMMQTNYYLADVQVKGHYPAFLEHYFARRQFNLDITLEDRDVLLAGKVDYIGFSYYASHVIKAADEEPTDFITLGSNQEIKNTTLHRSDWGWEIDPVGLRYALNWFSDRYDVPLFIVENGLGAFDKVEENGSIHDDYRIDYLRQHIEQMKLAVEVDGVKLMGYTPWGIIDLVSAGTGQMEKRYGVIYVDKDDQGKGTLARSKKDSFDWFHKVIQSNGEDLT

SEQ ID NO: 89 - protein, 252 aa, LACTOBACILLUS RHAMNOSUS
MPTLSEYKTLLQADHVDPAVLTALEQDSRIGARKLLAAYQRRQDHQAAEAVALRYRSRYERKLWKMYSHVAGLDEVGRGPLAGPVVTAAVILPHQFKWPVNDSKQLTAHERDVLYPHILTEAIAVGIGVADNHEIDRENIYHATELAMAQAVSHLRVAPEFLLVDAMHVPVNLPQERLIKGDANSISIAAASIVAKVIRDRLMVMYDRVYPGYDFKDNMGYGTKAHLAGLATHGVTPIHRRSFGPVRHCLKS

SEQ ID NO: 90 - protein, 281 aa, LACTOBACILLUS RHAMNOSUS
MHFRRINYIPDARSSMRKYASSYYRHVHWVESQRHIEAWHMTAPDNQRLEALWLPHPGSQKAVIIGHGYKGTGITMSNFAHMFYDLGFNVLLPDDRGHGESDGEYISFGWLDRLDYLGWLQRILDRLGNDAQLLLFGTSMGGATVSLVAGEPSLPKQVKAVIEDCGYTDVETELAYLLKKQFHLPPLPLVPLASFINYRRLGYPLRVVNVRQALTRNRLPLLVIHGAEDVYVPTKMGRENYAASAGPKALWIVPGAAHAESYWINPAAYQAHVKRFLDIFF

SEQ ID NO: 91 - protein, 426 aa, LACTOBACILLUS RHAMNOSUS
MKILTGTLTELQQQVTTRQQTVAQNPAVQTTVQKILADVKLNGDKALLAYNATFDDVAISDLRVPQAQINAAMADLSPKLLAALTLAKKNITSSHQLEMSQGFIDSPYPGVIRGQKLTPLAAVGLYVPGGTAAYPSTILMTAIPAKLAGVKKIVMVTPPQAKGLNPAVLAAAKLAGVDEIYQVGGAQAIGALTYGTESIPKVDKILGPGNRYVAEAKKQVFGDVAIDMIAGPSEIGIIADDSADPVRVAADLLSQAEHDPNARAMLVTTSPALADAVSKAVDSQLLSLPRKAIAQAAITNQGFIAIVPDVASAFCLMNTIAPEHLEIQLPNPITYLNEIHNAGSVFLGENAAEPVGDYVAGPNHVLPTAGSARFFSPLGVYDFVKRTQFIQYSAAALATQADAIVTLAQTEGLDGHAEAILKRITR

SEQ ID NO: 92 - protein, 382 aa, LACTOBACILLUS RHAMNOSUS
MSNRHLPVGTRDEFGPRAIRKENLIQMMSHRFIASGYERVKTPLLEYRDVFQPLTVRGEQPYQMLDDAGEAVVMRPDLTLPLARLLSTTSIQPPVQWWYVGDVFRVRKSLSGTYNQMTQAGIELIGYASIKAEWACLSEATRICEDLGLTDLTLELSDVQFVSQVMQALPLDPATASALQAAFFKKNLSTYQQLIAPLRAEPLYPFLQQWPWLFGEAATIFTQLAQLLPPTLLHSRLKPLQQTVAFLQHQFPQVTITVDLTSQPPQSYYTGLFFHAYASDSRQYLFSGGRYDQLLASFQQDLLPAVGLAFDVDALSDILPDDPKPALTLVYGRPSQWQEAAAVVATTPHAQLCLVDSLAEAKTMAQKYHAKLIDLSPKEAMQ

SEQ ID NO: 93 - protein, 418 aa, LACTOBACILLUS RHAMNOSUS
MDVTTIDLEQMGRAAKAAATVLSQLTTAQKNAGLLAMVTALETHTETILGANHEDLKAAASLPAKFTDRLVLTAERIADMAAGVRQVAALPDPTAQTDKAWVNHAGLNIAQKRVPLGVVGMIYEARPNVTVDAAALTFKSGNAVILRGGKEALHSNLALATVLQAALTAQGLPKDAIQLITDPKREVANQMMHLNGYIDVLIPRGGRGLIKAVVEQATVPVIETGAGNCHIYVDAYAQAQMAIDIVVNAKVQRPSVCNAAEKLLIHADVANAQLPLIAAALQAHGVELRGDERARAIVPNMQIATEEDWDTEYNDLIMAVKVVDSEEEAIAHINAHNTKHSEAIITDNYQNSQQFLQQVDAAVVYVNASTRFTDGFEFGFGAEIGISTQKLHARGPMGLAALTTIKYQVLGNGQVREG

SEQ ID NO: 94 - protein, 274 aa, LACTOBACILLUS RHAMNOSUS
MLHCKRLVVKIGTSSLIHQNGKVNLQTIDRLAYTLAALTNQGYELVLVTSGAIGVGMAKLGVTVRPAEIAQQQALAAIGQSELMTLYTQRFSDYGAKIGQLLLTHDVFDYPQTRQHVLDTIDALLKRQVMPIINENDSVAVDELDHRTTFGDNDQLSALVAKQIGADLLVVLSDIDGLYDRDPNRHANAALIPAITHVSAKVLAGAGGSSTRFGTGGMVTKLKAAQVMMRAGKHMVLTSGRDPRIILRVVAGESVGTWFGTELEPVPSEVHAAN

SEQ ID NO: 95 - protein, 332 aa, LACTOBACILLUS RHAMNOSUS
MMMKKILMYSVRPDEQPAIDDWVAANDLQVDTNTVAFNADTVDLAKGYDGVVIQQHGAIPEPLVYQKLKSFGMKQLTLRITGYDIVNLDAATANGLAVTNVPAYSPRSVAELVLAHAMRLIRHLGEATAREAKDDYSWGGLEAQEVHQLTIGIIGAGKIGSTVARIFRALGSTVIVADPVTRPELADTVRYVDLDTLLATADIVTVHTPLDDITTHMLDAAAFKKMKKTAYLINAARGPIVDTTALIEALQRGEVAGAALDTIEGEAGIFGVDRSQSGVDNTNLETLKALPNVEISPHIGFYTDAAVKNMTYNLLDDVKTILRRGAFTDQVN

SEQ ID NO: 96 - protein, 275 aa, LACTOBACILLUS RHAMNOSUS
LTEAPLKIGILNVMHDKADTKTRLQHVLSHTDIPVELHFYYPMTHYAGREVPEAVSSILEPLDIHEAATMDGFIITGSPIETLEFDQVHYIAEVRTLLKTLGQHVPNQMYLCWGGMVALNYFFGVSKLILPHKLFGVYPQTILEPHPFLKGLKEGFKSPHARYAEMDVRDIRDDPRLTINATTTKGKLFMVTEPTDTQTFIFSHIEYDRWGLDSEYKREVAAHPEISYKRAKHYYHHKNDYDHPKFNWKKTQRTIFDNWVRHIADHRNENRSPII

SEQ ID NO: 97 - protein, 730 aa, LACTOBACILLUS RHAMNOSUS
MVKYTPKLGQITYYKRFYTAQVDERDCGVAALNMLLKYNGSDYSLAHLRELAKTNQDGTTALGIVRAAEALAFETKPVQANMQLFDLEDVPYPFIAHVLKRGELLHYYVVFKATRTSILIGDPDPSVRMTWLSREVFEKEWSGVAIFIAPAPQYQPRKEDKGSLFAFVPMLAKQKGIIANIILAAVLITVISIVGSYFLQSIIDTYIPNAMRTTMGMIASGLLVAYLLQAVLTYGQNFLMAVLGQRLAIDVILGYVRHLYELPMSFFSTRRTGEIVSRFADANKIIDALANTIMTLFLDVWIVLILGIVLGIQNGTLFLVSLIAVPCYLVIVFAFQRPFDRLNQETMESNAILSSSIIEDLNGIETIKSLTGERVSYERVDREFLTYLKKSFSYTKADQLQQAIKGLLKLALNVVVLWIGASLVIANRMSLGQMLTFNALLSYFTNPLESIINLQPKLQMARVANNRLNEVYLVESEFKEQRHLTERHLIEGPIRVRDVSFKYGFGQDVLKNVNLEVPENAKYTIVGMSGSGKSTLAKLLVGFYPVDADKGTITFNGIPVKDINLTTLRQYIEYVPQDPFIFSGTVLENLTLGSRSDVSEQDLTQACLAAEIAADIANLPQQWQTKLSESGSILSGGQKQRLAIARALLSPAKVLIFDESTSSLDTITERKIVDRLLAMTDRTIIFVAHRLTIAAKTEQIVVMDHGKIVEQGDHATLLAQDGYYARLVHE

SEQ ID NO: 98 - protein, 381 aa, LACTOBACILLUS RHAMNOSUS
MAGAYIHIPFCEHICYYCDFNKVFIEGQPVDDYVAMLLKEMRMVMAEHPEEKIETVYVGGGTPTTLTPQQLAVLCQGIRDILHFDHGEFTFEANPNDLLTTDKLQVLYDFGVNRLSIGVQSFNDDVLKRIGRIHRAKDVYTAIGNARKVGFDNLSIDLIFRLPDQSRDDFLNSLQKALALDLPHYSTYSLILERKTIFYNLMRQRKLRLPTQDVEADMYQDAIDLMEAHGRHQYEISNFAKTGYQCRHNLLYWQNDKYFGFGAGAFGYLGRDRYHNYGPIKQYLAPLHADHLPVLAHHLVPVSEQIEEEMFLGLRTMAGVNEDRFYSRYHMTVDAVYGETVPELESQGLIERQNGYIRLTNRGKFLGNEVFQQFLLDEPLV

SEQ ID NO: 99 - protein, 333 aa, LACTOBACILLUS RHAMNOSUS
MTVTLTAGQFKHLQKLSDENNVISALAIDQRGSLKKMLAAAANKPADETTIVDFKKAVSEELTKYASSILLDPEYGLPAAKVRAPQAGLLLSYEKTGYDATEPGRFPDLIDNQSALRIKNEGGDAVKFLLYIDPDEPDSINDRKYAFVERVGAEAKANDLPLFLELVSYDGKTNETGTAAWAKAKPEKVIKITKEFSKPQYNVSVLKVEVPVDQKFVEGFTDEGVTPVYTKEEAAKYYKAQSDATDLPFIFLSAGVSNELFLEELKFAKEAGSTFNGVLCGRATWKPGVKPFAAEGEAAGKQWLETEGKANIDRLNKVLADTATPWTDKVEHA

SEQ ID NO: 100 - protein, 634 aa, LACTOBACILLUS RHAMNOSUS
MCGIIAFADKTILNKKPVINNMMDMIKHRGPNSSGEYINDDVALGFRRLSIIDLKGGSQPILNEDGTVAIIFNGEIYNFQSIRKDLIAAGHVFKTHSDTEVLLHGYEEYGIEELLKKIRGMFAFLIWDDNKKEMFGARDFFGIKPMYYYHDGDTFIVGSEIKAFLKHPKFKKQLNKEALKPYLTFQYSALDETFFKGVYRIPEGHYFTLKDNELTIKKYWDMDFKANNLSFEDTVAAIDKSVSESVDAHRISDVEVGSLLSSGVDSSYITALLRPEHTFSIGFDNKKYHEGVAAKELSDKLGLDNTSDIVTEKEALDNFPLIQYHLDEPDSNPSCVPLYFLTRLAHKDVTVILSGEGADELFAGYANYGFHTRSHAIRVFADGLRKLPRGVKYRIAHGLKKMPNFHGRLHLYESTAPAEEFFIGEALVFHEGQADEILQPEFRQSKSVRDIVTESYKKVRHYDDEVKKMQYLDIHQFMPKDILLKADKLSMANSMELRVPFLDKEVAKVAAGIPTKYLINSHNSKYALREAANRHLPEEWASREKLGFPVPVKQWLEDEPFYKKVRETFEQDWVKEFFDQDAILDILDKTYRKERNDRRKVWTIYTFLVWYKVYFIDDEIPHYVADSNKEKLEA

SEQ ID NO: 101 - protein, 347 aa, LACTOBACILLUS RHAMNOSUS
MQAVLENGPKQIEIKSFPDPVIQGDEILMKIRANGLCQNDVRDYTGDTKWTYPRVGGHEFSGEIIAVGNAVNPKHFQVGDHVVKYILPNCGECYYCKTGRPNLCTEIYSSPTFHNDYGISGFWGMSQLMAVKTTDLFKYPHTTSFLDMAFTEPLGCVINSVERANVQLGQDALVIGGGVMGLLHVMTLKLKGARVLVSEPNENRRRLALELGADFVFDPMQKDPVALVKNETDGRGADVVFNTTAVPAIAKQAIAFTANGGQTFMFSSMHPDDPVSIDLGAVHAHEKFIKGTVSPTRETYFRATQLISKKALNLRPLLDKTFPYTDAESAFQYAMLPETLKTMVTFD

SEQ ID NO: 102 - protein, 183 aa, LACTOBACILLUS RHAMNOSUS
MLVVSSYWSQRQAEVSQRQAIVDKKAAEKAKKEAFIKRLVPTAQAMQKQYGVLTSITLAQAILESDWGTSTLAKDYHNLFGIKGTDPATTKVLRTKEYVNDKWITVDGRFRVYSDDAASIRDHALLFVNGTDWNPQQYATVRAAKDYKTAASALQTDGYATDPDYPQKLIHLIEAWNLTQYDN

SEQ ID NO: 103 - protein, 1222 aa, LACTOBACILLUS RHAMNOSUS
MVDYVNPGLNEHKPDLAWAKEYAKRVKTDNTGFKNDTERQLYNKIKVVISDEVGVGSFGKDMVTDSSLRNAITAAGYHYSTEDDSAKNFTALADKYDKEVWNSEAQATFGNSDYWPNSGTGIGGAGSSLEMANTIVKGFTDSRRTNFIYQPAIAAFYEGGQYSSKSVLQATDPWSGWTNSDVAIDVLAQFSKFAKLGWENSDNTSGIWRAVSQASVSTATGSNNVNGRNGLANYLTLASPDKKDFSTVIVNDSKYTKHYQISASNMAYKGTPTLEEWETRAADTTAKDAYDSNYLKHVGDVQADSKGVYTVTVKPFSIKTVTTLDKAKDSDLNQGISASSNKQRTVLDTDTNGKGTDTSDTTLYADNFEYGGKKVATLNADGTSNAAKTEDFITSRGGDEGFYPLYTFNRNGTLEGYKTTNAKSGHYVLRQQLDSTVVEPGGAWNDGDALAWIGDNRWMNYKASTDVSFEDKGTHGSANYASIGARQQADSGPAAYLKFWQDGGWSLHIGSQSVASGNIATGQGGTKISGFDTTNTAWHNIAIQAAGNTITASIDGQKVADGKVTSELSGRVTLGSGYFHTDFDNLKVETVKGYTPYYSQQIDDLEMYDTSATPKQQLVYNDQWTHETGQGMYLRDRTVSKNTGAGATLTYTFTGTGLDICGNNDGSAKLDVTVDGKQVATDAATNKADNLGQTYTLRNLKYGQHTVTFTVKSGTLAVDYVGVVPSDTIADFSKLQTAYDKVKDVTNADNKYTSSSWTSFQKVLLAAKNVLADTTASQNDIDTALKNLNTAYAALALNPDKTKLQAAYDKAKAVTNPSDKYTAASWKVFQTALTDAQDVLANANATQNDVDSALENLNQAASDLVLNPAKPDKTKLQAAYDKNKTVTNPDDKYTSESWQAFQTALSDAQKVLTDTNATQDSLDTTLQKLNNAYAGLKLNSQKPDKSALQTAYDKDSTVTNQANKYTTASWTTFQSALANAKKVLADTDAVQADVDTALQKLNNAYDGLTLSPDKSALQTVLTEAQTLSHSAVTGDHEGNYPADALKTLQVAIDTAKKVADNPDASKNDIDTAASTLKQAVTAFKQTIVTVNRDQLTQLVTESQTLRADDYTRNSWTPYQQAVAAAQKLLAGKPSQQELDTAATALKKAKTSLVAAPTGKLPSTGDASSESASSSEETASSSTAKYPSTGESQLSLAVTMAAVVFLIGISGFAWFLHQKGKAK

SEQ ID NO: 104 - protein, 874 aa, LACTOBACILLUS RHAMNOSUS
MAKGRLSRPRRLTLRLLPRWVALTHKRNWCMLVATHFYQLFQPKHYDLYLDINRETKKISGKTTITGDAKQTEIAVHQKYLTVSAVQADGKDVPFTVDDPAEAVRITLPQAGKVTLTLTYTAPLTDTMMGIYPSYYEVDGVKKQIIGTQFETTAARQAFPSVDEPEAKATFDLAIKFDEHPGETIISNMPEVREENGVHYFDTTVRMSTYLIAFAFGELQNKQTTTKSGVKIGVFATKAHQPNELDFALDIAKRSIEFYEDFYQTPYPLPHSWQLALPDFSAGAMENWGLVTYREALLTLDPDNTSLETKQRVATVIAHELAHQWFGDLVTMKWWDDLWLNESFANMMEYVAVDALQPDWHIWETFQTLEVPMALQRDATDGVQSVHVQVEDPAEIDSLFDSAIVYAKGARMLVMVRSLIGDDALRAGLKAYFEAHHFGNAAGADLWAALGKAAKLDVGTIMQSWLEQPGYPVVTAAVVDGKLTLSQQQFFIGAGKDAGRQWQIPLNSNYAAAPQIFADKQVTLGDYTQLREASGQPFRVNVGNNSHFIVKYDATLLADILAHLDQLNAIDQRQVLQDLRLLAEGRQNAYADIVSLLPRFAQSHSAIVINALYRVANDLKQFVNPDSAEETQLKTFFNQLSADQFKRLGWTPKVGESNDDQLTRPYILSMALYAKNKDAIAQGHDLFTANKDHLLQLPADVRMFVLQNEVKNFGSATLFDQLLTAYKQTTDSSYKADILAALTSTPDAALIAKIVDQFENADTIKPQDLRSWFRGVLSNHAGEQAAWDWVRNEWAWLEKTVGGDMEFTTYITVIAGIFRTTQRLDEFKKFFEPKLPTPGLTREITMDTSVIASRVDLIQAEQQAVYEAVAKAIK

SEQ ID NO: 105 - protein, 390 aa, LACTOBACILLUS RHAMNOSUS
MKIGIDAIEMDTPDFYVDLVKLAKVRGDDPNKYTIGIGQDEQAVPPSSQDIVTLGANAAAKVLTPASRASLGMILVGTESGVDASKSAALFIHDLLVLPEWVRAVELKEACYGGTAALMMARDYVASHPDKSVLVIAADIARYGLATAGEVTQGAGAVAMIVKADPRLLTIEPDSVYRSASINDFWRPVYQDTALAQGKYSTEQYLAFFKTVWERYQADHHLSAHDFAAMTFHLPYTKMGKKALDLVLPTTDDASAQRLKNRFEASTRYCRRIGNIYTGSLYLGLLSLLDHDTTLQAGDRIGLFSYGSGAVAEFFSGILQPQFKEQLHAAEHAQQLTKRQELPVPEYEAAFSDKVPYDADDYRPDPAYYRGQFILTGVIGQERHYEKHQS

SEQ ID NO: 106 - protein, 651 aa, LACTOBACILLUS RHAMNOSUS
  VARIANT (1)...(651): XAA = ANY AMINO ACID
MPKIHQLSATLSNQIAAGEVIERPASVVKELVENSIDAPSXTQIDVKVSAAGLQTIHVSDNGIGIDPDDVATAFLRHATSKILTTRDLFNVHSLGFRGEALASIAAVADVTLTTATDAGIGAKIHVKGGQVESQTTAAHRRGTDVEVSDLFFNTPARLKYMKSQQTELGKIVDIVSRLALANPKIAFTVSHDGNMMVRTAGQGDLRQTLAGIYGLPVARSMVDFQAEDLDFKVSGLTSLPETTRASRNYLSLVVNGRYIKNFQLTKAVIAGYGSKLMVGRYPMGVISIQMDAALVDVNVHPTKAEVRLSKEDQLSHLLSEAIRARLAKENLIPDAMDNLPKRERYDLDQLELTLNKISLKTTAVPNQGAEVRENADTNTVNTPTSQPAAQTEAAVDLTINDLDDRPIFDEPQRLAAWDQRYQTLDANVAPALVEDAAASDLKRPEPTERFPDLTYLAQVHGTYLLAESGDGLYILDQHAAQERVNYEFYRQAIGEVSNDQQHLLVPIVLDYSAADAINIRTHRDVLEAVGLYLEDFGQNSFVVEHHPTWFKAGQEEDTIKEMVDWVLRDGKISVAAFREKTAIMMSCKRAIKANHHLDDQQARALLQKLPQCENPFNCPHGRPVLVHFSNTDLEKMFKRIQDSHESGEMQA

SEQ ID NO: 107 - protein, 387 aa, LACTOBACILLUS RHAMNOSUS
MALVDRMNHEVRQLKPSDILQFNAEISGIEGIVKLTLGEPDFPTPEHVKAAGIQSIENDESHYTQSKGLPGLRATASHYLATKYKTSYDPETQILITAGATGGIYSSLTAMLNKGDTVIIPTPIFPLYIPIVLLNGAKPIFIDTSADGFILKPEKLQQAIEANRDTVKAVILNYPTNPTGVTYNRADLSALANVIKQYEIFVLSDEIYSELTYSGTHVSMGEILPDQAIVLNGVSKSHAMTGWRVGITAGPAAIIQQIGKVSEFTITSVTTNAQRAAEEALKNGMEDSQPMKQAYRKRRDFLMKALPEAGLEVPHPDGAFYIFAKLPDRFHDSWKFVYALAREAKVAVIPGASFGPGGEGYVRISYAASMADLKLAAERIKQFMATH

SEQ ID NO: 108 - protein, 519 aa, LACTOBACILLUS RHAMNOSUS
LLVNYFINFGMPASKSGIEHAQIKRKRLFDKHGEPYVFLLRDWERDLHTNTANAGITDDHLVNMFDYYQHACHVDAVRLLPEQVDLGLKDLQYSDDYEHNRMLVSRADGRLAARINYVRGTRQVVSVELFDGVENLYQVEFYDVRGFKSLVQWYTPDNKVGNEEWLTVDGRPVIRAFNKKNEDGKLKQTGWILTDRKGKIFQFDTIDAFFEHFINDMNETGQNVFILDRSLLADEALIHLEKPAYTIMHLHNSHAGDAQRPMDSIMNNNYEFALVNGAKYSAFVSATKKQAADVQRRFPYIKKSFHVPVGVVSDDVLHRQRILSENRIFGKVIAVARIAPEKNLNDLVRAIAIVHKQIPQVTLDLYDYPDATNHYAEKRKIEKTIQELSLEGVVTFKGYTENLESAYDTAQIFGLTSIMEGFDLSLLEAISHGVVGVTYDVNYGPNEIVQDGINGYVTPYGDIHALAEKIQLLLSDRDKMQQMSTNAYESANRYSEENVWKKWHKVLMDAQKSEGEVTK

SEQ ID NO: 109 - protein, 195 aa, LACTOBACILLUS RHAMNOSUS
MRTATITRTTKETAITISLNLDQQSGIDIDTGIGFFDHMLDAFAKHGRFGLIVKAQGDLDVDPHHTIEDTGIVLGSCFKQTLGDKAGIERFGNAFVPMDESLARVVVDLSGRAYLVFDAELTNQRLGGFDTEVTEDFFQAMAFAGEFNLHAAVLYGRNTHHKIEALFKALGRSMQAAVALNPAVKGIPSTKGVIS

SEQ ID NO: 110 - protein, 309 aa, LACTOBACILLUS RHAMNOSUS
MVTAADNITGLIGNTPLLKLNRVVPEGAADVYVKLEFFNPGGSVKDRIALAMIEDAEYKGVLKPGGTIVEPTSGNTGIGLALVAAAKGYHLIITMPETMSVERRALMRGYGAELILTPGADGMPGAIKKAEALSKENGYFLPMQFQNPANPDVHERTTGQEIIRSFDGGTPDAFVAGVGTGGTLTGVGRALRKINPDVQIYALEAAESPMLKEGHGGKHKIQGISAGFIPDVLDTNLYQDIIEVTSDQAIDMARHVSHEEGFLPGISAGANIFGAIEIAKKLGKGKSVATVAPDNGERYLSTDLFKFDD

SEQ ID NO: 111 - protein, 1097 aa, LACTOBACILLUS RHAMNOSUS
MLWKDIRKSFTTSWGRFFSILLLMMLGSFALVGLWVAGPDMRATGATYFKQYNLADLTVIGEDGLDSHDQKTIQATAGAKQVEFGYLKDVTLKGTHASFRIMSKPDKISKYKLASGHMPTKTNEIAIDANYKGKYKLGDTIKFVQRADQTGSKVLKRTQFKIVGFVYSPEVLSAINKGDSTSGSGDLKGYGVVTANNFDSDFYMMARITYQNTQKLDPYSDQYTDRIQSHKTALNQRLKDAPADRLAAIKKQYQKKIDAGQKKLDEAKAQLDSAKEQLTTGQQQLASAKQQITAKQQELDTAVKNGQAQIASGEAQLQQAATQLSQSELQLASAKQQLEASQQQLDAKHQDLASAKQQLDTANQQLANSQAQLAAAKQEIDAALTNNPQIAQVPVFQQKQAQYQNGIAQYNQGLEQYQNNLQAYNNQVAAWNTANNQLQQKYQEYNSGASQFQQGQQSYAAKQQELEQAKQSLATQQQSGQQQIEAAKQEMASNEATLKTKQAEYDQQAPNAEKEIQSNSLKLEDAKEALKNLKAPTYTVDTRRETPSGQGYMVYDNTSNIIDSLANIFPFFMYFVAALVTFTTMMRFVDEERINSGTLVALGYSRHDVIKKFTVYGFLSSLIGSILGIISGHILLPLIVYNAYHGGVNVPPIELHFYPGISIAALLLAMISAVLPAWWVARRELKERPAQLLLPKPPANGSKILLERVGFIWKRMSFTHKVTARNIFRYKKRMFMTIFGVAGSVTLLFSGLAVQHSIGGVNDRQFNDIIKYDMIVAQKDNITKNQQTSLDKLFNEKAVKKTKSVHYETVSKNAGANHDRQDITMIVPQSTKNFDSYIHLATRKGQNKLTLQDNGGIISERLAKLLNVDVGDTITVKEADGTRRKVKITGITEMYMGHFLFMNKTAYQKAFNTNYKVNGHLVTLNDRSISNTRAHAAQFMKEDGVKGVVQNSSLRNQITTVVKSLNKIMGVLIVLAAVLGVVILYNLTNINVAERMRELSTIKVLGFYDKEVTLYIYRETILLSIIGIFVGWGFGELLHEYIITVVPPNNVMFNPALSAPTFIIPTIVINIITVALGFFVNYSLKRVNMLEALQSVD

SEQ ID NO: 112 - protein, 110 aa, LACTOBACILLUS RHAMNOSUS
MTAAKQSITELYDLIQSRKSQPVSGSYTDYLFTKGLDKILKKVGEESTEVIVAAKNPDDAAFILEVADLTYHVLVLMVERGISLDQIATELASREGKMSRLKERDKINKY

SEQ ID NO: 113 - protein, 110 aa, LACTOBACILLUS RHAMNOSUS
MIPLDFKKASGLITTVIQDATTKQVLMVAYMNAESLEKTMTTGETWFWSRSRNMLWHKGETSGNTQTVQAIAVDCDADTLLITVNPAGPACHTGHTSCFYRQYTERKGTQ

SEQ ID NO: 114 - protein, 261 aa, LACTOBACILLUS RHAMNOSUS
MKKIWLGLGVLLLLLAAGCGVSRQAAKSSRSSAPVRSRQASATSTPPRPTRLARLKAKNKAQLVYAPFGDSLSVGLFADKKTTRFTSLFARQLAQLTGKTVTEAGIAEVGKTATNLGVPALSQLVAQHPDVVTIEFGTNDAVGGATPTALNAYQQALTTIVTTLQKETSAQLILMTTWSPNQGPYVNADLKFDAVVKTVGQTYQVPVVDLATIWQGHDDVTGPAGTVIPDFSANGPRDTFHPNQRGHDQIATQLINTLEER

SEQ ID NO: 115 - protein, 512 aa, LACTOBACILLUS RHAMNOSUS
MSLFMGLTNALVLNFRAQSFPCASKCGIIKVRLLFADEEIHFMAKELPNITKIAVALSNHSKMLVLDSLMDKRGHTLLEIAREANIQPQTASYHLQNFINNGWVKMEKSGRFHYFFLVSDQVAALIEQFSPLSPSASTHTLTRALKVDKMRTFRSCYDHMAGKIGVLITDQLLADPRNNLIRVVNEMKDAGFTAFNIGPEPEFFLFKLDEDGNPTTHLNDRGSYFDFAPLDMGENCRRDIVLELEKMGFEVEASHHEVAPGQHEIDFKYADALEAADNIQTFKLVVKTIARKHGLYATFMPKPLHGINGSGMHINMSLFHDKGNAFFDPDTGDQLSETAMHFLAGVLRHAYALTAINNPTVNSYKRLVPGFEAPVYVAWSGKNRSPLIRVPQSRGLSTRLELRSGDSTANPYLAIAAILQAGLDGVKNQLKPEEAVDRNIYRMQDDERKANHIQDLPSTLHNALKALAADDVVKAALGKHLYQSFMDSKNLEWSAYRQQVSEWERQQYLELY

SEQ ID NO: 116 - protein, 495 aa, LACTOBACILLUS RHAMNOSUS
MVGENVFTFNSGTEFSQLQRLKAFNQNGIESKLLLRNYNRFLYRDAKRAGVNKDAYINMYDYFQGVVGVERKEQKLRLLESIPLTKYHVVGIDNNTTTIDLLGRTLAKITVMPETVGLVGSIDYYDRFDHKELTEFWDWRGFKSMEQNYNPDGTVAAQKFLDQKGHVVLEIIHMNKNGQLAPTMWKLVHYQGHDYVFDSEDDLFRFFLNEISKGNPGIMISDRRTLDAAVKQVNHATAKLAFIHEGDLFLKGEGKKRVPNVIYNEVLSEQHPFSTVIFPTHDQVKAIETQYPHLTIAAAPDTYAQTPKAKKIQPDHPRLAYIGRLFPDKQITDLVDAFERVHRERPDAELFLKGYFSDEAYRREIRDRIHKKKLDDAIHLVAYSNDNQDILDKTTLFVSAAKSEAFGMNSLEAMSYGIPVVAYGCHFLKHNLLVNRQNGVAVVNMTPSELGKAILVVLQDNRLYHKLQAGALSTAKQHSEADFIGAWKSVLSAFF

SEQ ID NO: 117 - protein, 138 aa, LACTOBACILLUS RHAMNOSUS
MEIILVGHAHTAKAFKEAVEMIYGEVPNFHPIDFTPKEGLQSLTNKIISAIDPKKASSTLIITDLFSGTPYNAAAELVLKKKAADVVAGMCLPMLLEVAVNANSMDVGQLVSHLMKSKEEFSTSLSEKLTANAKEDDF

SEQ ID NO: 118 - protein, 266 aa, LACTOBACILLUS RHAMNOSUS
MSDWLSLLGKTIIVTGGSSGIGEAIVKELLQNGANVVNGDLREGSIQDPRLTYVKTDVTNPEAVENLAKVATQINGEIWGVVNNAGINKPRVLVDPKDPHGKYELDVHTFDQIFNVNVKSVFLVSQAAVRRMVKQRHGVIVNMSSEAGLEGSVGQSVYSASKGAINGFTRSWAKELGKFNIRVVGVAPGIMEATGLRTPDYEEALAYTRGTTVEAIRAGYKSTSTTPMGRSGKLSEVADLVNYFVSNRASYITGVTTNVAGGKSRG

SEQ ID NO: 119 - protein, 346 aa, LACTOBACILLUS RHAMNOSUS
MDLQLMAALSNADAIAANEGEVRAVLRHHLASYGLTSQTDGLGSLIFTKEAADPQFSVMLYGHMDEVGYMVRTITPEGLLRLMVVGGVKPAASHWQNVRITTAAGHKLPGMVIRDDTLPAFDQVLCDVGANSADDVAALGIAIGDMVTFATKFHAYAPDDVFGGKALDDRLGCYVGAQLLAELADEKLPFTLHFAATSSEEVGIRGAKTATQLIKPDLAFIVDVATFQNPRERGEVNQRQVGKGPILTHFDRTLAPNRRLQQFVKATAVAAEIPLQLDMFNGGGTDGGEAHKVGSGIPTVVTILPCRYGHCAQSLAHTRDVDQMVALYAAMCRQLSAKLVAAAHTF

SEQ ID NO: 120 - protein, 407 aa, LACTOBACILLUS RHAMNOSUS
MKLVFCHFLQGGELLVISSAQTPTVCIEPQDRRMRVTAIFIRPTHPATMPEMTTNFDAILADPNIDVVVEAIGGLHPAYDYILRALQHGKHVVTANKAVVAQHLPEFITTAAQHHVRFYFEATTGGGIPWIRNLERAARIDQIDTIEGIFNGTSNYILDQMQRAHLDFDPVLLAAKDMGYAEADPSADIDGDDVVNKLKISAALAYDMIPPRDVPKFGIRNVTKADIDFFASRHQVLRLIGKSRRVGNHYSMVVEPRLYPATALAANTFENFNLIRLHGQTIGDLQFYGQGAGKYPTANAIVQDLFDILENAPHLTRHFDQNLQFDADLNTADYLLRADPLTFAMFNDKDTEVVRDHLLIKQIPTGEMHRLMRGVLAIDAHAFMAAIGDSELTTRNVKEQVDQGVIE

SEQ ID NO: 121 - protein, 524 aa, LACTOBACILLUS RHAMNOSUS
MLMPWLLTTLRRDLMEILTDYMPWIIAAVLLILLFIFLATHRKTALPNEVLIISGALISGKHSFRDVNGNRVKLITNGGSFILPILQRWDVLSLNTRTIEVATPEVYTQQGVPIIVNGTVILKIGSSQEEVATAAEQFLGKNDEQINSEATEILEGHLRAILGTLTVEDTYQNRDAFAEKVQDVASSDLAKMGLQIISFTIKDIADKNGYLDSLGKKQIAEVKKNAAVAEAAANRDTRIQQAQADQEAKQQEIERQTQIADAEREQQVKMADFKKQQEIAQAQADQAAIVEQMKAKQVQKEKDIELAQKNAELQEQELNATVRKQADADLYKAQRAAEAQKATQIAAAEASAKEVELDAEAKANATKAIGEAEAGKTKAIGLAQAEAIAKQAEAARQLDESGRFKMTIEAMPKIIEAAMSPYANVDSIKLYGDGDLTNQTSGSLVKQLDMLQEVAGIDIRGMLNGALMHQAGNQPVVDAIKHHEQPAAKAPDTKQPAPAPKSDQPATTEQAASSTPSRMAEKQK

SEQ ID NO: 122 - protein, 373 aa, LACTOBACILLUS RHAMNOSUS
MKIKAAVVDEKGADFKIRDDVELAPMGPDDLQVHMVASGICHSDEALRIGDAVIGYPIVLGHEGSGIVEKVGPEVTQFKPGDHVVLSFYACGNCKNCLKGIPTQCLNYAHNNLSGTRPDGSAHFTENGKPVADMFDQSSFTTTTVVRERNAVKVDKDLDLRKLGPLGCGYVTGSGTVLNTLKPKPGDTIAVTGTGAVGLAAMMAGKISGCTKVIAIDIVDSRLELAKELGATDVVNSKTEDPVAAVKKLTGGLGVDWAVDTTGVKAVMEDTIQMLAQGGTTATIAVTPHHIDVDTWNDLCVNDKKIVGVNMGDSIPQIDVPRLIEFYKQGMFDFDKTEKFYQFDQINEANADSRSGKTIKPVLIIDKDYVPGK

SEQ ID NO: 123 - protein, 215 aa, LACTOBACILLUS RHAMNOSUS
MAGVIVGDYAQFSKKRDDVVKAAIFGVIPAGVLMIAVGAILTIAFKSTDISSLFMKIGSPVIGGLALILGTWKVNVVNAYSGGIAVANIFNIPEKYRKLTLFLVGVGGTILSILGILNYFEPVMTIFSAMIPPVAGAMAASYWVIHRGEMHSWQPVAGVNWLGLTAWALGAVIGVLPVRWPAIPNIPVLGIILAFVLYYAGAKIHPEWDKASELN

SEQ ID NO: 124 - protein, 158 aa, LACTOBACILLUS RHAMNOSUS
MANEVMNRRNNELMNDVNDPFFDNLARRFFGPVSDWMDWATPSIVSTAVNGLLTDVKETKDAYEVHVDVPGIDKNNIKLNYHDGILSINVHKDDITDHADKNGNVMMSERSYGTMSRSYQLPNVDDSNIKANYKDGVLNITCPKLTESKESGHNIEIQ

SEQ ID NO: 125 - protein, 317 aa, LACTOBACILLUS RHAMNOSUS
  VARIANT (1)...(317): XAA = ANY AMINO ACID
MGLTPRFMPNALRGRDYLNVHPEARAADLKTAMTDPDIKGIICAIGGDDTYRIVPYLLDDPAFIKTVQTQPKIFTGFSDTTINHLMFYQLGMTTFYGPNFLNDLAELDTHLLPYTAASFQHFFENPATTAITSSPTWYEERTDFSADQLGVPRKAHPEQHGYLALRGHGQVTGTLLGGCLDSLHDLLYPVRYDDEPQVAKKYHLFPQDWTDKILFIETSEDKISPATYREYLEHLADHGVLQQVKAILVGKPXNETYFADYQQVLLDVTQPYQTPILYNLNFGHAYPRTVLPYGLQATINFDRRQLTVDEPYFSNPL

SEQ ID NO: 126 - protein, 417 aa, LACTOBACILLUS RHAMNOSUS
MEDINMESTALRIYGKKDLRIDTFDLPEMKDDEILATVVSDTMCMSSWKLAMEGEDHKKTPDDLAHNPAVLGHEFSGKILKVGKKWQSKFHAGQNYVIQPNLARQNTPFVPGYSYPYIGGDATKIIIPDEVMTMGCLIPFEGDAYYEGSLCEPVSCVIAAFRAQYHVNFHSYQPTTGIKEGGNMLIMGGTGPMGLLAIDYALHGPKKPSTLVVTDVNQAKLDRAKKLYPSDWVDIKFVNVNNLSLDEQKEVLLDAVDGNGYDDAFLMISVAPLATLADSLLNPDGCLNQFAGPMKKDFSASVNFYNIHYNFTHFVGTSGGDADNEAEAAKLIAEKKLDVSKVITHVMGLNDAAETTMNQPEIGGGKKLVYSGKKFDRIELAKVDPTTDLGKILAKHDGLWSKEAEDWILTNEPDYDA

SEQ ID NO: 127 - protein, 279 aa, LACTOBACILLUS RHAMNOSUS
MFDEEALTMSLLYPKQNQEIQPGVHLIQDVNATNSPMKYTAVKVLELDAQRSFAETLGNFEAGIVILAGKVTVTAGDQRFEGIGQRQSVFDKIPTDSVYVGTGLSFKLAAQTTAKVLIAYSPTTTSFPVRLIKGDIHQIEHRGRYQNKRLVQNILPDDLPFADKLLLVEVYTDSGNWSSYPPHRHDHDNLPTESLLEEIYYHEMQPKQGFVFQRVYTDDLSLNETMAVQNQDVVIVPKGYHPVGVPDGYDSYYLNIMAGPIRVWHFHNAPEHAWIIDRK

SEQ ID NO: 128 - protein, 324 aa, LACTOBACILLUS RHAMNOSUS
MSQKFDLIAIGRAAVDLNAVEYNRPLEETKSFAKFVGGSPANIAIGSAKLGQKVGFIGKVSDDQLGHYVTQYMADVGIDTTQMVKDDAGHKIGLTFTEIISPEESDILMYRNEAADLYLTTADVSEEYLAQAKMLVISGTGLAQSPSREAILKALTVAKSLGVEVVFELDYRPYTWKNAEETSLYYQLVAQRADVIIGTRDEFDVLENHHGNTNEQTIATLFKYDPKLIVIKSGVQGSNAYTKAGDHYHFGVFKTKVLKSFGAGDSFAAGFLYAYSHDLGIETALKYGSAAASIVISQLSSSEAMPDLAKLTAFIHEAERQEVH

SEQ ID NO: 129 - protein, 282 aa, LACTOBACILLUS RHAMNOSUS
MPDLGKEVTFEQAIDEMALAGYQGTEVGNKYPKDPVVLKHYLDLRHLKIASAWFSAFLTTKPYEETEAAFIKHRDFLHAMGAKVIVVAEQGHSVQGMLDKSVFDDKPHFTDEEWQRLATGLERLGDRAHEVGMQIVYHHHMGTGVQTTAEIDKLMAMTDPDKVSLLFDTGHLVLSGEDPLTIFDRYYDRIKHIHFKDVRPEQAQQERTDHLSFLQGVKNGMFTVPGDGMIDFKPIWEAIQKQHYDGWIVVEAEQDPAKANPFEYALKAKHYLDTIMTIPQAV

SEQ ID NO: 130 - protein, 346 aa, LACTOBACILLUS RHAMNOSUS
MVVKVGVIGTGAMGRAHIDRLTNVLTGAEVIAVTDIDQEAAQAAVRDFKLNAKVYPDDTSLLKDPDIDAVFVVSFGGAHEATILKALDTDKFIFTEKPLATTLEGAKRIVDKEIGKPRKVIQVGFMRRYDEGIHALKTKLDSGIIGTPLVVRASHINPNVAANYSNEMAITDTLIHEIDEMHWLLDDDYASIQITYPRQSSQVTNEGLRDPQLATLTTKKGTVIQVLVHVTAQYGYEVKLEVVGETGELKLPDYGFEPIVRTQATQQTAMETSWVNRFLQAYNTEVQEFIDHVAKDQSPVGPSAWDGYVAAVTAEAAIRSQKDQEPVLINVAETPTFYQTNQPVKA

SEQ ID NO: 131 - protein, 290 aa, LACTOBACILLUS RHAMNOSUS
MALIPATKLIQAALADHAAIGHFNINGADWLETYLKVAQKTGTPIIVATSDRIIDFLGGFDFIAGYVRFMVQALHITAPVVLHLDHGLSVEHVYQAIDAGYTSVMFDGSKLPIEENVALTDEVVRYAHQHHVSVEAEVGSVGGNENGLINGIRYASVTDAVKMAATGIDALAAALGSVHGDYVGRPNLNFERMAAIAAATKLPLVLHGASGIPDDQIQQAIQTGTAKININTEVNTVWTAAITKAVQAKRSGHDPQPILLAGKKAIAQLVETKMKAFHILGKSKRSVTFE

SEQ ID NO: 132 - protein, 555 aa, LACTOBACILLUS RHAMNOSUS
MSEATYTPVSNRTRFPLITRSPAQKSACKDLSRNGQRAAHHRLRPTYTRISKRAGSRSLYKGVVFMQRNKQLRPENFINGQWVDAKTDTFEDVYNPPTGEVLARVPHSTSEDVADAVAAAKAAFETWKRVSIPKRAKILFKYQQLLVEHQEELGRIVTQENGKSLSEAIAEVGRGIENVEFAAGVPTLMMGDSLSAVATDVEATNYRYPIGVVGGITPFNFPMMVPCWMFPMAVATGNTFVLKPSEKTPLTSQRLVELFQEAGLPDGVLNIVNGADDVVNGLLDHPDVKAISFVGSERVGEYVYKRGSDHLKRVQALTGAKNHTIVLADADLDAAVKGIISSSFGSAGERCMATSVLVLEESIADKFMAKFTQAAKDIKIGNGLDKDVFLGPVIRQENQERTLNYIKTGVKEGAKLVLDGSAEAEKRDGYFVGPTIFEDVKTDMTIWHDEMFAPVLSVMRAKDLPEAVAIANQSELANGACLFTDSAASIRYFRENIDAGMLGINLGVLAPIAVFPFSGWKHSFFGTLHANGKDSVDFYTHKKVVTARYDQHRFN

SEQ ID NO: 133 - protein, 252 aa, LACTOBACILLUS RHAMNOSUS
MLTKRIIPCLDVDQGRVKKGVHFIQLKDVGDPVAIAKAYEAQGADELVFLDITATTDARQTMTQTVAAVATQVFMPLTVGGGIRSVTDMHQLLRAGADKIALNSAAVKHPDLITAGAEKFGRQAIVVAIDARWQPSRNRYQVMINGGRTPVDLGVLTWAQQAVAAGAGELLITSMDADGTKQGFDLRLYQQLSSIVTVPVVASGGAGSANDFVALFRNTNVSAGLAASIFHFGELTIPQVKTVLKQAKVAIR

SEQ ID NO: 134 - protein, 194 aa, LACTOBACILLUS RHAMNOSUS
MKRKPIRIRPFQRPIPSVATCWTTSVKLPVASILPNDRNPRMIKITLDIIIAKELVVIMPKVYFLCTGNACRSQMAEGFAKKLLGRQWQVKSAGIEAHGLNPLAVKVMAEKGIDISQQQSKVLKEAELQQADLIVTLCGDARDRCPVTPPTVRRLHWPLADPAAASGSQEAVLAVFRQVRDQIEAHVRALKADA

SEQ ID NO: 135 - protein, 163 aa, LACTOBACILLUS RHAMNOSUS
IKIIDKIEKTSVSGTKTWRDNNNQDGIRPSSITVNSLANGQQVASKKVTASDNWQYSFDNLAAYANGQKITYTVTEDAVAGYTSTVDGYNITNTHNPTTPKKPQVPNNPTTPKEPQVPNNGNKVTPKDFTQGKMYDKTSRLPQTGDGSSMGMMLIGLVPLLLS

SEQ ID NO: 136 - protein, 197 aa, LACTOBACILLUS RHAMNOSUS
MRGYIFIHCKQEQQGWRLIRLSPSGPRGAFPHGRPSERILQENELITIDFGIVLADYQSDMTRTLSIGKPPAELAAVHAAVLDAQQTAIAALKPGMQGREVDAIVRGVLTAAGYGDCFTHGLGHGLGLGGDQPILNPRSQTVLAPGMIVTIEPGAYLPGIGGVRIEDDVVITETGARVLNQTSRQMNQLEVLEHEPI

SEQ ID NO: 137 - protein, 407 aa, LACTOBACILLUS RHAMNOSUS
MTEKIVLAYSGGLDTSVAIPWLMDKGYEMIAVVLNVGQPGMRILTRINKKRLKVGAIDSIVIDAQNEFGDHYVAPVIKANALYEGDYPLVSALSRPLIIEHLVKIAHAQNATAIAHGSTGKGNDQVRFEAAIHALDPEMKIEAPIRDFHWSREEEIDYAKDHHVPVPIGKKSPYSIDANLWGRANEAGILENPWNQAPDDAWGMTVAPEAAPDKPTFLDLTFQQGVPVALNGNPMPLAAMIKQLNQIAGANGIGRIDKIENRLVGIKSREVYEAPAAAVIMTAHHDLENLTLERDVQHFKPTIENKLTNMIYEAQWISPLFDALMAFIDKTQAVVNGTVKMKLYKGSAVPVARQSTHNSLYDEDLATYTSADSFDQEAAAGFIKLWTLPTTVFEQVNHVHSEEKQHD

SEQ ID NO: 138 - protein, 473 aa, LACTOBACILLUS RHAMNOSUS
MTDKLWGGRFTEKAAHWVDAFGASISFDQQMAKEDLEGSLAHVKMLGKTGIIPQADADTITAGLHHLQKELAAGKLHFTVENEDIHLNMEALLTAEIGPQPKSGPVAGKLHTARSRNDQVATALHLWLKHRLPAIKEALTNLQTVLVGQAKAHAATIMPGYTHMQHAQPITYGHYLLAYFEMFQRDWERFDFTQKHTDILPLGAAALAGTTFPIDRELVAQELGFDQLYHNSLDAVSDRDFALEFLSNSAILMQHLSRMAEELILWSTFEFNYIELGDDFSTGSSIMPQKKNPDFAELIRGKTGRVYGALMGLLTTMKAIPLAYNKDMQEDKEPIFDAYNTILGSLHIFTGMLSDLTVHEQRMAAATTHDFSNATELADYLATKGVPFRQAHAIVGELVLKGIKTGTALQEMPLSELQEAAPQIQEDVYAELTSKAAVNRRTSLGGTAVSNVLKEVARDEKIIADHENAAPSM

SEQ ID NO: 139 - protein, 738 aa, LACTOBACILLUS RHAMNOSUS
VTHVEMSPEAIAEKKPYLALGLTEDEYHRFAELIGHQPNDTEIGLASGMWSEHCAYKYSKPILRQFWTKNDRVLMGPGEGAGVIDIGEGKAVVFKAESHNHPSAVEPYEGAATGVGGIIRDIFSIGAKPVAMLDSLAFGDLNLPHTQHLVDRIVAGIGGYGNAIGIPTVGGETNFDHTYARNPLVNAMCVGIMDKDQIQKGKAAGVGNALIYVGAKTGRDGINGASFASGDFSDEEAADRSAVQVGDPFMEKLLMDACLEITQDHQQALVGIQDMGAAGLVSSSVEMAGKANSGMEMDLDLIPQREANMTPFEIMLSESQERMLLCVRAGFEQEVLDVFAAYDLDAAVVGHVIEGHQYRLYHHGKLVCDVPVSSLTDDAPIYEQVGKMPARLAEPAPDFDPIVTDPVATWKAMMGTPTIADKSSLYRRYDAQVQTNTVVLPGSDAAVIRIRGTHRALAMTTDSKGRYLYLDPKIGAAMSVAEAARNLTASGAEPLGITDCLNFGDPTKPEAFYELAEAAKGIIAATKAFNAPVISGNVSLYNETNGKAIYPTPMIGMVGLIEDLSTITTANFKHADDLLYLVGETHGDFNGSELQKLQTGEVAGRLFDFDLDAEKSNQQFVLTAIRQHLVTAAHDLSDGGLLVALAEMGFTNQLGAQVKVDLPTSWGFSETQGRFLVTVAPEDQAAFEALNGPAELIGRVQAAPQFDVTTVSHQFSVPLEELQTAFEEALPCYLNQKA

SEQ ID NO: 140 - protein, 208 aa, LACTOBACILLUS RHAMNOSUS
MIVIVDYDTGNTLNVKKALDYLAIDNQLSADPAVILAAAGLILPGVGAFKTAMSALTQRDLVPVIRQFAATGKPLLGICLGMQLLFDRSFEFGETAGLGLIPGTVVAIPPRAGFPTPHMGWNTNTITQPDPFAAGFANQATYFVHSYYVQTQPAYTLATTDYGQPLTSIVRRQNILGTQFHPEKSGAVGLAGLQRFKEMTTDATLSSN

SEQ ID NO: 141 - protein, 148 aa, LACTOBACILLUS RHAMNOSUS
MAEEQTLVLVKPDGVAQGHIGEVITRIERRGFTIEALKVTQATSAQLHQHYAALVDKPFFPKIERFMTSGPLVAMIVSGFNVIEAVRTMTGATNPGDAAPGTIRGDFGREWADQTIRNVIHSSDSEASAQREIPIWFAGKQYAPKANQ

SEQ ID NO: 142 - protein, 1222 aa, LACTOBACILLUS RHAMNOSUS
LYDKKITDAAVKPDTDIVVPAGKSVQVPFTLSLPKTFDQQQFVEGFLNFKGNDGSSLNLPYMGFFGDWNDGKIVDSLNGVTYDPTGGNYGTVPMLTNKKTGSQYYGGLVTDASGKQTVDDKAVAFSSDKNALYNDISMQYYLLRNISDVQVDVLDNHGNKVTTLSSSNNQTKTYYDSTGRNYTYYRAPAWDGTYYDQRDGNIKTAADGNYTYRISGVPEGGDKRQTYDVAFTLDSKAPTVRHVALTSRQEKGKTTYYLTAEAKDDRSGLDATKSAKTSVNQVTNLDGTFTTTGTTADGYTKLETPLTDKQAQALGQGDNNVELYLTDNASNATDQSASAQKPGSTAYDLIINGGGLPDKITSQTANYQAGKQGGTYTFTGTYPAAVYGTYTDAQGKQHDLTTTYDADANSFKATMALDASDYATKVDLYTDQAHTQLVKHFDTNVRLAAPTFSDLRVNDNQDQTSESTVKVTGTASADTKKVTVTNGGTTTPVTLDAKHHFSGDVPVNYGDNTITVTAEDEDGNTVTKQQKVNSTYDADVLKNAVTFDQGVTFGANQLKVKDAKYYDPKTGIATITGKVKHPTTTLQVDGKQVPINDDLTFSFKLNLGTAGQKPFGVVIGDTTQDKTVQDSLTFILDAVAPTLSLDSSTDKPVYTNDPNFRITGTATDNVNYLELAINGSQVASQYEDINLNSGQPGHMAIDQTVKLLEGKNVLTVAATDSGSNVTTKKITVYYEPKKTLAAPTITPNTTDPAKEVTLTAKAAAGETVQYSTDGGKTYQDLPTTGLSVSANADFKFKAVDLYGNESPAVDYAVKNIKTDDPAQLQKAKTTLQDLLTQAKAKATSAQYTDATTNALNTAIGSAQTALAKADATIETLTTATTQLTTAVNQLVDKLPADQQAALLNKIQSAKEAFGTDLGGQTDPSTGKTLNAELDAVAAQTTAGTSTADQIETNFNKVLDAALNQLAKTIKAATPVKVGNAKDTTTGKTWYGDVDAVIAAGTAAKTDTEKIAQLQGLFGLKTKIAAAVEAAAKTPQQPGGGSGSGSDTGKGSGSGSGSEAGKGSGTGSGSEAGKGSGSGSGSDTGKGSGSGSGPDTGKGSGSGSGSEAGKGSGSGSGSDTGKGSGSGSGSDAGKGSGTDKENQPKDTPSTNPKGGDDKKQTQETPAQPTGTENANSNGASSQASTKDTLPSTNESPRPALAFLGALVMGGLGLLGIKRKRKQS

SEQ ID NO: 143 - protein, 391 aa, LACTOBACILLUS RHAMNOSUS
VHLAKRILNVAPSATLALSNQTKDLKAKGADVIDLSIGQPDFSTPKAIDDAAIAAIQAGNASFYTAATGIPELKQAISDRIFAQDGIRYDHRQIVATTGAKFALYALFQVFLNPGDEVLIPVPYWVSYEEQIKLASGVPHLVMPAVGHKVSVDDLEAARTDKTRALIINSPQNPSGVVYDRTELTLIGNWALKHHILVVTDDIYRDLIYNGTTYTSMISIDPDIAANTVLISGVSKSYAMTGWRIGYAAGPEKLIQAMATFISHTTSNPAAVSEYAAVAALTGDQQVVEKMRRAFEERLNLFYDLLADIPGFDMGDKPQGAFYLFPNIKRAAQLSHYGTVDDFISALLTETGVAIVPGRAFGMPDHARISYCKDLASLKEAARRIREFVGK

SEQ ID NO: 144 - protein, 458 aa, LACTOBACILLUS RHAMNOSUS
MKCAGGNTMASEKSSLKSTIRVSITNFLDSGSIVAGASGLTLWTQHFGLSSFQVGLLRALSANAFGAALGALIGGPLSDKFGRKLIYTYDMLVYMVGTILVMFALNFPMLLAGFLVTGLAVGAGVPASWTYISETSQDDNRAKNIGVSQFAWSLGPAVIFILGTVLAPLGLFGNRILFGLLTVIAFIAWLLQRGLGESKAWQDQKAFEKSSGEKSHPYRTLFSNKTSLKWLCFLVGVYMFWNLVAGAMGFFMPYVYETAGGLSNQEANLLQAVLWVLTALATYFGFAKYGDKANHRIFFFVGAAMAAASWIVLTYAGMAQSWSLWAFVALWGISAGIGAQAWYALWATELFPTQFRAGSQGVMFFLVRASAGVWSIIFPAILNSLGFTVAGTFMIGLLLVSLVIGTIWTPKTRGKSLEEITREQYGDKFLTDDEKSKADRDTAAKDTGSERVSPQSIN

SEQ ID NO: 145 - protein, 493 aa, LACTOBACILLUS RHAMNOSUS
MKEVVMSIRQFPENFLWGGATAANQLEGAYNVDGKGLSTSDLLLGGTHNVPRQLTREVRPDAFYPSHEAIDHFHRYQEDIALFAEMGFKVYRFSIAWTRIYPNGSASDGPSKEGLAFYAALIAELKRYNIEPLVTISHFESPIALTKAFNGWASRDMIEEYVTFAQTIIANFHNDVHYWLTFNEINMLTRPMGAYLAGGMYVDDTNRFISPDIDSTQMRLQALHHQFVASARVCSFAHGFDPNLKIGCMLAYRMLYPLTSHPEDIALVQTATELNNFYCGDVQVKGRYPYFAKRYWRDHDITIDIEPWEEEILKRGTVDFFALSYYQSSTMTTTESGETSGGNFFAGVKNPYLQRNDWGWEIDPRGLRTALNQIYDRYQVPVMVVENGFGARDELIEQDGQKTVNDTARINYLRAHIAAMYDAIQDGVDLIGYTSWAPIDLISASTGEMAKRYGYIYVDKHDDGSGTLNRYRKQSFYWYQQVIRQNGLSESDA

SEQ ID NO: 146 - protein, 496 aa, LACTOBACILLUS RHAMNOSUS
MEELLESSLLKHYEIISFLLDKEWVTIKQVAEETRIPARTIRQNIGTINQYIAPAKIESSQRYGIRLAYDSAHNPLYIYAAIYRQSTRFLILEQIFLHHYLSIAQFSEALFISESTLKRHMQVLNQILPHYGFHIDTQTLDIIGDEKKIHFFYYTYLLERYWFIDDFLPQDELKLIAAIISEFFAHYPTLTTPRYQSFSFINKLRATIFVCLKRNSRGHTFENATPAIENATFSPELRQSIARCYKIDCSSLVFSHLFYLFFNPRNAWSYADLLTKTHQDAEIRAIHRALTHFLDMVVATEHLSLPNREQVLLRLYNAIEYTWGPTKILYSPSEAFFASMNQFSKTFIRQARQTLVTALRNEKVNVRIDDAFITKLLFTLVTSGETLPLQLEQKAPKVRTGLFFNTSFEHSHFLLNELNYHLRSNLKLELVPASTLAELKTVARQFDLIITNLPLLNLPNCQVVAIQPHPTPEDFDNILAAYNRIINAKSLESSVS

SEQ ID NO: 147 - protein, 244 aa, LACTOBACILLUS RHAMNOSUS
MIFRKPQPFEYEGTDTGVVLLHAYTGSPNDMNFMARALQRSGYGVYVPLFSGHGTVEPLDILTKGNPDIWWAESSAAVAHMTAKYAKVFVFGLSLGGIFAMKALETLPGITAGGVFSSPILPGKHHLVPGFLKYAEYMNRLAGKSDESTQILAYLPGQLAAIDQFATTVAADLNLVKQPTFIGQAGQDELVDGRLAYQLRDALINAARVDFHWYDDAKHVITVNSAHHALEEDVIAFMQQENEG

SEQ ID NO: 148 - protein, 399 aa, LACTOBACILLUS RHAMNOSUS
MSLLATLLQALDDDEQEMIAIRRQLHAHPEVSFHEKQTAAYIKAYYAALDMPVVPCGDGYGMYVDIEGGQPGPKLALRADFDALAIQEDNELPFKSQNPGVMHACGHDAHTAYLLVLAKELNKIKTQLSGSIPIIHQPAEEVSPGGAKGMIAAGVLEGVTNVIGVHVMSSMPTGLIGYHTGATQTGRANFTDTIIGKGGHASMPHLSNDAIVAGSYLVTALQTIVSRRIDPFDTASVTIGSFDGVGSFNAIKQAVVLKGDVRVMKESTRQTIHQQIVTMNHGLEAMFGVQTKLDYDDNYPVLINDATLTNQAMAAIKAAKIPQITAIKDTGVQDPSEDFAYFAQKVPSSFFYIGCQLPDGSNHPHHSPDFMLDEDAILIAAKAVAAATLGYLDQNKTVQ

SEQ ID NO: 149 - protein, 237 aa, LACTOBACILLUS RHAMNOSUS
MWKVITDAVPQMIAAGIKYTIPIALVSFAIGLIIALVTALTRISVRKGILIRIAKGIAVFYVWLFRSTPLLVQLFIVFFGLPSLIIPGIFPHGIKLDPAAAGIITFSLNTGAYCAETTRASLLSIDSGQWEAAYAIGLPRRLVLREIIIPQALRTAIPPLSNSFISLIKDTSLAASITIVEMFQVSQQIAAENYQPLLMYSIVALLYAIVCTFLAWGQRYLEKFTSRYNANAQTTQL

SEQ ID NO: 150 - protein, 567 aa, LACTOBACILLUS RHAMNOSUS
MSKKIIVIGGVAGGASVAARARRLDESAQITMYEKGPNVSFSNCALPYHLSGMIPDAESIVLMDSEQFKQQYNIDAIVNHEVTAIHAETQTVTVKDVRTGEVTTDSYDDLFLSPGAVPILPRSIHGIQNTNVFTIRNVDDIKALATALKDRKATNVSVIGGGFIGIEAAENLVKGGYHVNLIEGADHILATIDQDMAQLVQKTMLDNDVRLIVHDTLTAIENDHITLASGKELPTDIVIMAIGVKADTELAQQSGIKLGKTGNIQVNQAFQTNLPHVYAVGDAIEVYQRLLRQPTRLNLAFPAQLQARQAVDHAFGRQIRNRGVIGSQCLPVFNMNVASTGLTARQCQDAKIDYREALVIPKDKVALIPGAKPLYLKLIFAYPSGEILGAQAIGESGVDKQIDIIATAITNHNYVEDLETLELCYQPTFSTAKNAVNMAGLVATNILNGEFKQIMVSQVRPLVEAGAMLIDVREPDEFAEGHIISAKNIPMSRFREHLDEIPRDQPVYIHCLSGQRSYNVARALGNKGYHNIYNIAGSFLDLCEFEYFEDTTQNRKPIVTNYRFDLL

SEQ ID NO: 151 - protein, 385 aa, LACTOBACILLUS RHAMNOSUS
  VARIANT (1)...(385): XAA = ANY AMINO ACID
MIYFDNSATTKISPDALATYNKVSTDFFGNPSSLHALGTKANEVLQSSRAQIAKLIGAKPDEIYFTSGGTEGDNWVIKGTAMAKREFGRHLITTSIEHPAVINTMKQLEKLGFEVTYLPVDRRGFIHIDDLKAAIRKDTILVSIMAVNNEIGSMQPIVQAARVLDNYPNIHFHVDAVQXVGKGLDAALQDPRIDFLSFSGHKFHAPRGTGFIYAKEGRMLDPLLTGGGQEHDWRSGTENVPAIAAMAKSLRLLLANEDANVARQQAVRKRIFEHVSQKPKVTMFSQLTPDFAPHVLCFAIAGVRGETIVHAFEDHQIYISTTSACSSKKGTESSTLAAMHTDPKIATSAIRVSLDEANTLDEADAFNAAFDTIYAKFAKLDKATV

SEQ ID NO: 152 - protein, 398 aa, LACTOBACILLUS RHAMNOSUS
MREQFPFFKAHPGLVYLDTAATSQKPQALLDSLQNYYINENANVHRGLYKLAYDTTEAYEGVRQEVADFLSAKSADEIIFTRGTTDSLNLVASAFGPHAVPEGGRIVVSGAEHHSNFIPWQQLAKRQHAKFEVTPVHPDGMVDVPALLAAITPETNLVAIAQVTNVAGDTLPIAAIAKKAHAVGAVVVVDGAQAVAHLPVDVQTLGADFYAFSGHKIYGPTGIGVLYGRADLLAKMPPIQFGGEMISEVRDDVSTWAEGPIKYEAGTPNIAGVIGLGTALHWFKQNVDAAVLKTEHDLSDQLRSGLAAIPDVTIYGNQASLATVSFNLAGIHPHDLATFLDEQQIAVRAGHHCAQPLMARLGVPATVRASFGVYNNADDVAKLVETVQAARRYFHGVD

SEQ ID NO: 153 - protein, 146 aa, LACTOBACILLUS RHAMNOSUS
MLETKKTLEAQEIQAILPHRYPMLMIDRVLDLKPGESVVAQKNVSINEQIFQGHFPGNPIFPGVLQIEAMAQAGAIALLSMPDFKGKTAYLGGIKKAKFRHMVRPGDVLRIEVTLEKLIDNAGLGKGKVYVGEDMACSAELVFAIG

SEQ ID NO: 154 - protein, 448 aa, LACTOBACILLUS RHAMNOSUS
MDNQFKQYQLKPFVIAGLDAMGITQPTPIQKKVIPALLRGENLVGQSQTGSGKTHAFLVPLLSLVDPNEDATQVVITAPSRELANQIYAVAQQLTQTEPAIRISRLVGGMDKQKQIDKLQAHQPHVAIGTPGRILDMIKRYDLVPASVRHFVVDEADMTLDMGFLETVDAIASSFPEHLQMAVFSATIPQKLEPFLRKYMDHPTVIELKPQSVIADTVENILIAVKGRDKNELIYQLVTMGHPFLVLIFANTKTSVDAIHDYLKHQGLKVAKIHGGIQPRERRRIMKEVADLKYQYVVATDLAARGIDIKGVSMVINAEIPRDQEFFIHRVGRTGRNGLPGTAITLYEPGQEDQIAELEHMGIKFKPKTIQKGELVDTYDRNRRVQRKPKQEDTSLAIRGLVKKAKQKHMPNYRKKIRTAVLLERKRNAKVARRQALLAEKRKHRKRG

SEQ ID NO: 155 - protein, 290 aa, LACTOBACILLUS RHAMNOSUS
MKLAYDPSMFRDSMTLKQMFDEVARLGYEYVELSPRRDFIWFYEHPVADHTLIKQVKKYAKDAGVKISSILPVQQWSSPDEQEREFAVRNLKRTIEITAELEVLVLNTEFAGDKFQPLVSQGQWYKSMAELAPVFEKNNIELEIQPHPNDFIESNLAATRLIRSLDLDWVHQVWCSAHAFYMDDGRGDIRQQFAESGERITHVLIADTFNHKGNFGLRYIINPPGAPVTIHQHLNPGEGEVDFTTLYQVLNERHFDGIITNNVFAWPDRVDWSNDVTLQSIQSGLHLLKT

SEQ ID NO: 156 - protein, 295 aa, LACTOBACILLUS RHAMNOSUS
MGIELTQMALNRKIAQKRPLENFFQLAEAAGIHQVELRNDMTTSDGSETVIDGMQVAEFQTLKQKYDLQILTINAIQQFNNPAKLNKNRDLLTKLAELSAQIGNQAIIFVPEVNAQDKRTEQQRLDDAVSSLQVFGDILSAYHLTGFIEPLGFRASTMRYPWTALDAINLSGRTEFKLTIDTFHFFLAHLTAEQFKAGVDINRVGLIHLSGIEPIHALREVVDEDRILITERDIMQNIEQVHLFEAMGYRGHYSFEPFSSRLAAETNQQLTQQILASIERLNQPTAVFSTEVTQP

SEQ ID NO: 157 - protein, 231 aa, LACTOBACILLUS RHAMNOSUS
MNQVVSAVKKNLDLSQNRPIKEAIYEALRKTILLGEIPSGERINEKNLSENLNISRTPIRYALERLDEEDLVERKTGVGVLVKGISINDAYEIFDIRKELDVLATRKAMRLMTPEQFNQMRTLLEETDRLNAAGRVAEVMAKFTEFNNFIYDASHMLRLKMIVNQLQNYLIYFRDISINGDDRRNLAIQEHWLLYRGMLNQDDDQIKLITREHLEHSLHYILKVMKAKHIE

SEQ ID NO: 158 - protein, 467 aa, LACTOBACILLUS RHAMNOSUS
MAKQKVQFMETVLRDGQQSLIATRMPSSDILPILDKMDAAGYHALEMWGGATFDACLRYLNEDPWERLRKIRQAVKHTKLQMLLRGQNLLGYKNYADDVVADFVTKSVENGIDIIRIFDALNDTRNLKTALEATKQAGGHAQLAISYTTSDFHTIDYFIRLAKEMADMGADSIAIKDMAGILTPQKAFDLVSGIKQEITVPLEVHTHATAGMAEMTYLEAVRAGADIIDTAVSPFAGGTSQPATESMLVALQDLGYPTDVKLAEVSDIASYFAPIRDRFRDAGQLNPRVKDVEPKSLIYQVPGGMLSNLLAQLKDQGQEALYGDVLKEVPRVRADLGYPPLVTPLSQMVGTQSLMNVMSGERYKLIPKEIKDYVRGLYGQPPVPISPEMKKKIIGDAPVITTRPADLIEPQLPAFRKAIAEYAHSEEDVLSYALFPDQAKDFLGRREDPFYDVPVQKVSLTFDPTHN

SEQ ID NO: 159 - protein, 283 aa, LACTOBACILLUS RHAMNOSUS
  VARIANT (1)...(283): XAA = ANY AMINO ACID
MGLFKSAGKLXNRLQLTHMGFEAVHFNYADYEAFDLLTQGTLVPTRDFVERQREVKDDDELALIKQAVAIAEKGYQHVLATIKPGMREIDIANDLDFYMRKLGASNVSFETIVASGARSAMPHGAATEKKIAKGDVVTLDWGCIYHGYMSDLTRTFAVGQPDLKLKTIYKIVYETNQKVQQALKPGVLGRTINDLAHHTINDAGYGQYFGHGTGHGIGLSIHEGPGAWGPYLDVPAAKGNVVTDEPGIYIPELGGVRIEDDLVVTADGNQSLSQPAPADLLVL

SEQ ID NO: 160 - protein, 393 aa, LACTOBACILLUS RHAMNOSUS
MDKVVILSAKRTPIGKLGGELAGASAVDLGVTAAKAAIKAARLDPQQLDQAIFGNVLQAGSGQNVARQIALHSGMATNSTAMTINEVCGSGLKAIRLGQAAIQLGEANAVLVGGTESMSQVPYYAEAMRAGHKFGDTALVDGLSRDGLNDAFSQQPMGITAENVASRFQISRQAQDEFALRSHLRAAAAAAEGRFKSQIAPVTISGRHGDVTIDTDSAIRPDTSLAQLAKLPPVFEVGGTVTAGNASGINDGAAALILMAKSKAEQLGLHYLATITDYTEVGIDPDIMGYAPKLAIDQLMQKTGQTLTAIDQVELNEAFASQSVAVMRDLGLTDEQVNINGGALALGHPLGASGARIMVSLLYNLAERRQQTGIAALCVGGGIGMAMQVTLHD

SEQ ID NO: 161 - protein, 234 aa, LACTOBACILLUS RHAMNOSUS
MAQLDTEKIISTIANSKKTTPVKVYLKGKLADLHFPKSVHAFIGKHTGTVIGDWTEIQPVLKTAKLDDYYVEAAGRNTGVPLLDIKTTNARIEPGAIIRDQVLIGDNAVIMMGAIINIGAEIGAGTMIDMGAVLGGRAIVGKHCHIGAGTVLAGVVEPPSAKPVTIGDHVMTGANAVVLEGVTVGEGAVIAAGAVVINDVPAHTVVAGVPAKVIKKVNDQTEAKTVLLDELRKL

SEQ ID NO: 162 - protein, 262 aa, LACTOBACILLUS RHAMNOSUS
MPTKIGLHYNKIGVGKTIYFLHGMGLDGHSMAAFYEPRFTSEERHFARLYPDLPGMGNSPATSALQSADDVLAQVHAFIQATSEGPCYLVGHSYGGYLALGLLARFPDEFSGAFLTAPVVLAEKTARTVATLKHLISAPVTSQSPEFTDYQHMNVVINPSTWRQYQELILPGLKTFNRDFWVAMKNRHAYRLSIESRLTSLIKSPVTLVLGENDNEVGYQDQVVFAHKGAHMTTTVIPNAGHNLMIDAPEAVMTAFHQFLHK

SEQ ID NO: 163 - protein, 537 aa, LACTOBACILLUS RHAMNOSUS
MIFFINSNFNKNNSGIEHAQLKRAGLFRDHHVPFKMIFREWNPRLHEYLNHNGVSDDEALNMFDYYQNAEQVPAKILHAEDIDFGFDKLSYAKEPDNHRYLVTRGKLFVGRINYFEDDSAERVSSVEQFDGFGNLYRVDFYDFRGFLSLSQWYTPDNKVGTEVWHKVDGRPVIETFNKYDANHAFIKTGWRLIEDNGAVYMFSNIDDLTQHFYNNVNEQYWNDKEVNVFILDRSHLGDWQLIHLQRPAYIVMNLHNSHAGDAQDPMHSVMNNFYEYSLIHANDYDAIVSATNKQTHDVRERFHPTCKLFTIPVGVLPDEQLARPHVAMTDRQPAKVLVTARVAPEKQIDHIVAAIGIAKKDVPNISLDVYGYVDHRDDNRAMKRINAAIEKYHLQGAIKLHDYTNDVGAVQRNAQVYALASVMEGFNLSLMEALSNGMVGVTYDVNYGPNELVVDGKNGFVVPFGDIKAMAAKFVELFTHPDELQQMSDQAYELSDRYSEANVWKAWQALLDDAKKKDIHYTEEISAGIGDQRVKKA

SEQ ID NO: 164 - protein, 436 aa, LACTOBACILLUS RHAMNOSUS
LKFGQKPQPKSPATKYQYHIDGVDPNESKIVYHGKTIGKVNIAPGTVGLVGSIEYYNDMNTVVAKDIWDRRGFKSSTQYFHPDGAFGPQVFYDRDGKPKIEITRMNVNGELRNTMYKLLDYQGRAWRFDTENEMFVFFMNELMLKHSGVLINDRPSLISEVAAVVGARGKWQFLHSAHTYKPEQAGGSRNYVDYLQPLFATHMNDFDGVMVPTVEQKQEIDKFFHFKHVVVVPDSYAEPHKLVPAEKRDRNKIVYLGRISPEKEPQEAVKIFAKAKKDLPDLHLEFYGYSSDQSLDNSLKELIKKLEIEDAVHFNGYQNNDQLAKKLGDAAAVLSTSSSEAFGMNVLQAMSFGVPVIGYQVKYGMKLVVKEGISGYLVPNGESQQGAKALVKLLTDKDKWADMLESTYESSQKFNAAAAWQQWQAQQAAVPNVFSK

SEQ ID NO: 165 - protein, 288 aa, LACTOBACILLUS RHAMNOSUS
VKKIVTLFSIVFLALLASACGISHSSKQSGESITAVGSSALQPLVEAAGEQYQTEHLGVFINVQGGGSGTGLSHIQQGAVDIGQQDLFAEEKPGIKANALVDHKVAVVGIAPIVNPKVGVKNVSMTQLQQIFLGQITNWKQLGGKNVPIVLVNRAQGSGTRATFEKWALEGKQPIAAQEQDSTGMVRQIVGSTPGAISYVAFSYVDKTVRSLSVDGVAPTDSNVATNRWHIWSYEHMYTKGRPSGLTKRFLTYMMSPAIQKKLVQKMGYIPMTKMKVVRNASGQISRP

SEQ ID NO: 166 - protein, 615 aa, LACTOBACILLUS RHAMNOSUS
MKRCFATYRDDDAEGGKSMKKRSVLGMITLATALSITLVACGNKSSNSSSSTANKSVKFPVSYNNTAKAIKGGNVNVAVVNDSPFKGVFNEELYTDAYDNDYMSPAAESLFAYNSTFKFNNNGAATIKQDNSAKTITVTIKPNVKWSDGQPVVARDLVYAYEIMANKATKSQRYTESLQNIEGLTEYHDGKADTISGLTMPKGDNGNTMVIHFKQMKPSFNTSGNGYFLESAAPYHYLHDVAFDKLESSDKVRKQPLFFGPYKISKVVAGQSVEYTPNQYYWKGKPSLSKITFENVSSASITSALKNHKYDIVYGMPSDSYSDWKNISGYTNLGHQSLAYNYLGFKLGKWDDKKSENVYDPNSKMANKSLRQAMGYALNNDQVAAKFYNGTRSRATTLIPPVFGKDVHADIDGYDLNIDKANSLLDKAGYKKGKDGYRTDPKGKKLTIYFATMAGGSTAQPLAQDYIQQWKKIGLRVKLTTGRPIEFNSFYDKVQNDSKGIDVYAAAWSLSSDPSPMDLFSQKAPFNYTRFVSAKNTKLLNDIDSQKAMDPAYRAKALKAWQKYANDEAFVIPTLYRQEIFPVNKRVKNASVDYASAKYLNWSKMTVTSNSRATK

SEQ ID NO: 167 - protein, 320 aa, LACTOBACILLUS RHAMNOSUS
MWKTILRRILIMIPQLILLSVLVFVLSKMMPGDPLAGNFSQGQSAAQMAALRQQYGLNDPWYIQYVKWIGNMFHGDLGQSFVYKRSVTGLIGERAANTFWLALLSTVILYVIAIPAGVIAGRYEGSKRDSAISIASFILMAVPPFVFYLLGLIFFGFFLQWFPTGGSVSSTYNPGTLGYVWDRIYHMILPALVSGIITTSSTIQYLRTGVIDNTHQDFVRTARSKGVPDRVIFNKHILRNSLLPIAAFMGNQITMLLGGSVILETVFSYPGMGQLFVSSMTSRDYPVVISLVLLFGFLTLLGNLLSDIIMSIVDPRIRIE

SEQ ID NO: 168 - protein, 303 aa, LACTOBACILLUS RHAMNOSUS
MQNNANEVATDTTKIEQSPSNFKVILNEFRKDKVAVVSLFLAVTIILAAFIGSMLFNVGGATEVNILDRYMAPGTGGYILGTDEGGRDMFKYLFFAARNSITIGISVALIIEFVGVVLGTISGYFGGLVDAVIMRFVDFMMIIPSLLVIIVLVTIIPQYNVITIILIMAAFYWMTTTRLMRSLVLSEARSEYVMASKTSGTSNLKIMFTGVLPNISSLIITDLTLTIASSIGIETALSFLGFGLPMETPSLGTLIGYASNPDLIFNRWWVWFPAVLVLLTLSLSINFVGQAMRRAADSRQRRG

SEQ ID NO: 169 - protein, 315 aa, LACTOBACILLUS RHAMNOSUS
MIEVKNLKIHYPIRSGFFNRVTDHVLAVDGINFDIEQGETYGLIGESGSGKSTTGKAIVGLEPVTSGSIIYKGEDITKRSVRKRLQYNKDVQMIFQDSLSSLNPRKRIEDIIAEPIRNFQNLTKDEERHRVQELLDIVGMPSDALYKYPHEFSGGQRQRIGVARAMATNPKLIIADEPVSALDLSVQAQVLNFMKRIQEEYNISYLFISHDLGVVKHMCKKMAIMHRGRFVEIGTREDIYQHPQHIYTKRLLSAIPDVNPDDRAQNKEHRREVERIFKEEESKYYSKEGRVLDLQKISDTHYVALPDSTMKGVHD

SEQ ID NO: 170 - protein, 462 aa, LACTOBACILLUS RHAMNOSUS
MATSITAYDTIAAISTPPGEGAISIVRLSGETAVATANKVFKGKNLTQVKSHTIHYGHIVDPETGDLIDEVMVSVMLAPKTFTREDVVEINCHGGIVATNRILQLLLGEGARMAEPGEFTKRAFLNGRIDLTEAESVMDLIRAKTDRAMQVAVNQLDGNLHHLIKQLRQEILEVLAQVEVNIDYPEYDTDEMTTKMLLEKAQTVKKAIEQLLTTASQGKVLREGLATAIVGRPNVGKSSLLNHMLHEDKAIVTDVAGTTRDVLEEYVNVRGVPLKLVDTAGIHDTTDKVEKIGVERSRQAITQADLILLVLDQSEPLTTEDKQLLAATADKKRIIVLNKQDLPARLDTTALLQLVDADEIIKTAIPTSDGMDALDERIAKLFFGGIENSQGTVMVSNARQIGLLRQASKSLDAVMAGIHAGMPIDLVQIDMTAAWDKLGEITGESAPDELITQLFSQFCLGK

SEQ ID NO: 171 - protein, 639 aa, LACTOBACILLUS RHAMNOSUS
MLGGKQMPEVKKFEAGTYDVIVVGAGHAGCEAALAAARMGEKTLLLTISLEMLAFMPCNPSLGGPAKGIVVREIDALGGEMGKNIDRTYIQMRMLNTGKGPAVRALRAQADKAAYHRSMKHVIEDTPHLDLRQGLATEVLVEDGKAVGIVAATGAIYRAKSIVLTAGTSSRGKIIIGELMYSSGPNNSLPSIKLSENLEQLGFKLRRFKTGTPPRVNGNTIDFSKTEEQPGDKTPNHFSFTTPDSVYLKDQLSCWMTYTNATTHQIIRENLDRAPMFSGVIKGVGPRYCPSIEDKIVRFADKPRHQLFLEPEGRDTSEYYVGDFSTSMPEEIQLKMLHSVAGLEHAELMRAGYAIEYDVIEPWQLKATLETKVVENLYTAGQMNGTSGYEEAAGQGIVAGINAARRAQGKGPFTLKRSDAYIGVMIDDLVTKGTNEPYRLLTSRAEYRLLLRHDNADLRLTPMGHELGLISDQRYAVFLAKRQAITDELARLEHTRLKPKDVNPWLEAHHFASLKDGVLASDFLKRPEINYQTLEQFLPENPTLDHRVIEQVEIQIKYAGYIAKEEAKCAKLKRLEGKKIPARINYEAINGLATEARQKLVKIQPETIAQASRISGVNPADVAILSVYIEQGRISKVAQ

SEQ ID NO: 172 - protein, 590 aa, LACTOBACILLUS RHAMNOSUS
MEASVMTEKINAADAMIKVLEDWGIHNIYGLPGGSFDSTMNALYNRRHTINYVQVRHEEVGALAAAGEAKVTGRIGATFGSAGPGAVHLLNGLYDAQYDHVPVLALVGQVPTAAMNTNYFQEMNENPMFADVSVYNRTAMTAAQLPHVVDEAIRQAYKYQGVAVVTIPKDLGWQEIDDNYVSSANLYQKPLLPEPDPEQVATAWSILKDAKKPILYVGNGARGARDEIIAFSEKTHIPIITTALAKGVVPDDYKANMGSAGRVASKPGVEVARGADTVLFLGSDFPFQPYFIAPNAKYIQVDIDASKFGRRHTVDLAVLADAKKFIKALTEKADAVPETAWYRAAVANKANWAEWMTSFEDDSQTPLRVEPIFKLINEMADKDAVFQVDVGNVTINGMRYLKANDNQIFTTSGWYATMGYAVPAAIGAQAEFPDRQVWSISGDGGFAMVMQDIMTQVKYHMPIINIVLTNESLGFIEAEQDDTRQPHSGVDLIDADYGKAAEAMGAQGFEVHNLDELKAAFAKAKDRKGPVVIDVKISDLRPIPVEQLVLDKQTQDPEAVDAFVKKYHAETLIPFGSYSRMLKRQLQTFN

SEQ ID NO: 173 - protein, 478 aa, LACTOBACILLUS RHAMNOSUS
MADPKGFLKYQRKDNPMRPIMQRVKDFDALELDVSMEERRKQAARCMNCGIPFCHHGVFYGGGRAVSGCPNDNLIPEWNDLVYRAEDKRAFERLSRSNMLPDMTGRVCPAPCEVSCVQALNGPGVTIRNNEKYIIEQAFKNGWVIASGKPLQRTGKKVAVIGSGPAGISAAWRLNQLGHSVTIFERDDRFGGFLMYGIPNMKLPKTVVQRRIETLKQVGIELVANTEVGKDISADELKRQFDRVIVCTGARQARELQVPGRELGGIVQAVDFLKTATQTVLKDGTQANTQLKGKRVLVLGGGDTGNDCIATAIRQGCAGVTQLEITPALPPKRPAGNQWPEWPMTLKTGYGQKEAKALFGGDVTTYAATVTAFFGEHGQVSEAEISQVDHFKPIAGTEKKVKVDLVVLAMGFTGPEADVFDAFGITAKNANFTTNDTQIYVAGDCRRGPSLVIWGIHEGRMCAEKVDASLQTLASEAL

SEQ ID NO: 174 - protein, 163 aa, LACTOBACILLUS RHAMNOSUS
MTAFLWAQDRDGLIGKDGHLPWHLPDDLHYFRAQTVGKIMVVGRRTYESFPKRPLPERTNVVLTHQEDYQAPGAVVVHDVAAVFAYAKQHPDQELVIAGGAQVFTAFKDDVDTLLVTRLAGSFEGDTKMIPLNWDDFTKVSSRTVEDTNPALTHTYEVWQKKA

SEQ ID NO: 175 - protein, 800 aa, LACTOBACILLUS RHAMNOSUS
MHTLTIDGSQLQLEQNEANTIKGFGLLSCNNTSRLLMDYKWEHPQVYQQVLQHLFGGQHPLMRMLKVELGSDSNTSCGTEPAPQRAADEPANVARGMGFQLIADAKKIQPDLKTCMLRWAEPGFLRPSWRQVKSDDPDEKVPTEAFEAMYQYYKQTVIAAWQAYGYLFDYIDPDRNETKHPMYRYLKWFANRLKTDQADFPKGFPVADYHAIKLITSDQNYGTDMGTALLNDPELQAVIPAVGYHYNTDDGPDKPFTKIADQLHKEVWYSEGIAPVTFGTLRTQDTTGIGIGGPMSALDVANRLVKSYARSRRSLYIFQPAIGGLYPGAKYPGKQLLEMDTPWSGYFQQDTVALAVMHHFTDFAVTGWRDQTAAKNWRYVPSATVSEVAGTENLTQAFGAASVMTLVAPDETDYTVMLINDTSAPQTYQITVKNLAAATKPLYVWQTWADDAGKIHDREKTTTLTPVNGNVTVTIEPRAIISATTADFQPQALLPNPDVKTDQPLQQDPENHVLFHDDYSYADMPADYLTRRGGTPKYTTDMDGAFEVVEQDGKRGLQQKITEQSRALAWETQTDPNFTVGDIRWLNYAAALKFTFDTTTRQNTVSANYIGLGVRSVDDFEGSLFSAPYVATLTIGGKLRFYVRGSLAATLDVPVFDAEVSHELIVEATDRYVTVQVDGQTYVTYDDPSDQPGLAGQVKVGTGYFKTVIQALTVTSTSAPAVLGHRRDDLDASLTFSDDQWERFAARFPHAWERSQSIGEKGATVDFDVEGTGFVLFGTPSTRQVACSWPLTGGCRKWCR

SEQ ID NO: 176 - protein, 277 aa, LACTOBACILLUS RHAMNOSUS
MLPALPNTKELTLMSNLAAIFKNHKAFIPFVVADDPDFDTTVKNIVALAHGGADIVELGIPFSDPVADGPVIQAADLRAFAANVRTKTVFEIVEAARKETTVPIVFLTYLNIVFKYGYDAFLKRCAELKVSGLVIPDLPYESRAEIVPFAEKYGIDIIPLITPTSGHRIEKIAKSASGFIYVVSSVGITGERDEFFTGLKALVAEIKRSTDVPTAIGFGIHTPQQAQTMASIADGVIIGSAIVDIVAKEAQNAPAAIEQFTRAIRAAVDTQTESVVK

SEQ ID NO: 177 - protein, 449 aa, LACTOBACILLUS RHAMNOSUS
MLPAPFKSSTLLSLTCPAALKLPVTKMRIKFINLLKTQKRKSLMKTLNETAQPTNRAGRYGNDFGGQYIPETLMTELEKITAAFNTLKDDPQFKAELNDLLVNYANRPSLLYYAKNMTEDLGGAKIYLKREDLNHTGAHKINNVIGQALLAKHLGKTRLIAETGAGQHGVATATIAALMGMECEIFMGKEDTDRQKLNVYRMTLLGAKVHSVTSGSMVLKDAVNAALQEWASRSDDTFYVLGSAVGPAPFPEMVKHFQSVISIESKQQLQAKEGQLPDMVVACVGGGSNAIGSFAAYIDEPSVQLVGVEAAGKGVDTARTAATIERGSVGIFHGMKSLFMQNEDGQIDPVYSISAGLDYPGVGPEHAALAEAGRAQYVGITDDEAVQAFAYIARQEGIVAAVESCHAIAYVEKIAPTMAKDQIIICTLSGRGDKDVASIAKYKGVDVDE

SEQ ID NO: 178 - protein, 259 aa, LACTOBACILLUS RHAMNOSUS
MILDDLVAATRIRLARHQQPQSLTELKRIVAHQPSTTKSDFLTILKQPGLHVIAEVKKASPSKGTIVANFPYMAIAQAYEQAGVDAISVLTEPDYFNGHLRYLKTISQQVSVPTLRKDFTIDPYMIYEAKANGASIILLIVAILTDQQLRTFRQLAEDLGMQAIVEAYTAEEVTRALQSGAKIIGINNRNLKNFQVDFTNSLKLRAMVPDPIPVIAESGIQTQQDVEKLAAAGFNAVLIGETLMRSKHKRKLITAFRGI

SEQ ID NO: 179 - protein, 341 aa, LACTOBACILLUS RHAMNOSUS
MIKQAIEKVVNHEDLTFEESQAVLDEIMNGEASEVQTASLLTALTAKRPTIDEIAGAAASMRRHALAFPETKDVLEIVGTGGDHANTFNISTTSAIVVAATGTPVAKHGNRAASSKSGAADVLEALGLDINETPAISYQSLQENNLAFLFAQEYHKSMKYVAPVRKQLGFRTIFNILGPLANPAHPTRQLLGVYDETLLEPLANVLKKLGVTNALVVHGRDGLDEMTTAAETAVVELNAGQLTQYTVTPEQFGFNRSQRADLVGGTPEENAQITQNTLAGKQGPQRDIVLLNAGAALHLAHPELSIQDGIALAAETIDAGKAREELNHLRAFSAKRKDVVA

SEQ ID NO: 180 - protein, 199 aa, LACTOBACILLUS RHAMNOSUS
MVKVKVCGLMHPEDILAINAAQVDFAGFVFASGRHHVTLEQAVALRKLLHPDIQPEGVFVHESVDDILAIYQAGAIEIAQLHRTNTPTEIKQLQHAGLQVIQVFERQAIDLTSLADYLMVDSGKGSGQLLNLAAIPHITRPLILAGGLTPENVARAIQVVHPTIVDVSSGVETAGHKDAHKIHQFTQNAKEEITYENTK

SEQ ID NO: 181 - protein, 225 aa, LACTOBACILLUS RHAMNOSUS
MLFCYRAIHYAAQYIAEHFLEKAVRYNTVRNAFGYTGTFEGRRISVQATGMGIPSISIYVNELIQDYGVKTLIRVGTAGGMGSDVKVRDVILVQGSSTDSSIVLNTFGAGMYFAPIADFQLLREAANLADAGALRYHVGNVLGEDRFYNDEMDRQKLIDYGVLATEMETPALYLLAAKFHAQALSILTVSNHLITGEETTAQERQTSFNDMIGLALGVAKKIPVR

SEQ ID NO: 182 - protein, 741 aa, LACTOBACILLUS RHAMNOSUS
MAEEVELTQPDVMKLCKAYMNPEHLAFVEKAYKFAAYVHKDQVRKSGEPYIIHPIQVAGILAELKMDPETVASGYLHDVVEDTNITLGDIEEVFGHDVAVIVDGVTKLSKVTYVAHKDELAENHRKMLLAMAKDLRVIMVKLADRLHNMRTLQHLRPDKQRRIANETLEIYAPLADRLGISTIKWELEDLSLRYLNPQQYYRIAHLMNSKRTEREAYIQEAIEEIKKALADLHIKYEIYGRPKHIYSIYKKMRDKHKQFDELYDLLAIRVITETIKDCYAVLGAIHTKWKPMPGRFKDYIAMPKANLYQSIHTTVIGPMGKPLEVQIRTEEMHHVAEYGVAAHWAYKEGQTSKVQYDKAGKKLDIFREILELQDESSDAADFMESVKGDIFTDRVYVFTPKGDVYELPKGSNPLDFGYLIHTEVGNHTVGAKVNGKIVPLNYVLKNGDIVEMLTASGSAPSRDWIKLVYTSRARNKIKRYFKQADKSENAEKARDMLEHELQEEGYVPKDFMTQENMTGLMQRLNFQTEDELMSSIGYGEYTPKVIANRLTEKFRHAKAEKDRKAKEAAILSKNQKVTTVSSEKHQPQTHSEDGVVIEGVDNLLVHLAKCCMPVPGDAIVGYVTKGRGVTVHRADCPNVQSSREMSGRLIDVRWENEAVQKQLFNTDLEIYGYNRSGLLNDVLQVLNAQTKALNNINGRVDHDKMADIHVKVGVRNLAHLDKLMDAVKNVPDIYEVKRANG

SEQ ID NO: 183 - protein, 245 aa, LACTOBACILLUS RHAMNOSUS
ILVIKRSSIMKAPTQPIVVHFPLRGEWLAPNTPGSKVPSHGSNKFGTRYAYDFIQVNWQKLGRPAYRGSLLKYLFRGIPIDDYYCYGQPIYAPANGLVVRAEDHYPERKRTSFLGDLLRARNAARHFDPKRNNVQAVAGNFVILQIHDHVYAALCHLQTDSIQVGRGQTVQAGDLLGRVGHSGNSFGPHLHFQLMNNSDIEVAAGLPCAFAEYELFAGNSWLTQENAVPSKTDRICFVSPKSGPF

SEQ ID NO: 184 - DNA, 22 bp, ARTIFICIAL SEQUENCE
  MADE IN A LAB
acatattgacgctccaaaaggc

SEQ ID NO: 185 - DNA, 19 bp, ARTIFICIAL SEQUENCE
  MADE IN A LAB
gagccgttgtttcttcacc

SEQ ID NO: 186 - DNA, 22 bp, ARTIFICIAL SEQUENCE
  MADE IN A LAB
agcttacatgaaccctgaacac

SEQ ID NO: 187 - DNA, 21 bp, ARTIFICIAL SEQUENCE
  MADE IN A LAB
acctaaaaccgcatagcaatc

1. An isolated polynucleotide comprising a sequence selected from the group consisting of: SEQ ID NO: 1-80.

2. An isolated polynucleotide comprising a sequence selected from the group consisting of:
(a) complements of SEQ ID NO: 1-80;
(b) reverse complements of SEQ ID NO: 1-80; and
(c) reverse sequences of SEQ ID NO: 1-80.

3. An isolated polynucleotide comprising a sequence selected from the group consisting of:
(a) sequences having at least 75%, identity to a sequence of SEQ ID NO: 1-80;
(b) sequences having at least 90% identity to a sequence of SEQ ID NO: 1-80; and
(c) sequences having at least 95% identity to a sequence of SEQ ID NO: 1-80, wherein the polynucleotide encodes a polypeptide having substantially the same functional properties as a polypeptide encoded by SEQ ID NO: 1-80.

4. An isolated polynucleotide comprising a sequence selected from the group consisting of:
(a) nucleotide sequences that are 200-mers of a sequence recited in SEQ ID NO: 1-80;
(b) nucleotide sequences that are 100-mers of a sequence recited in SEQ ID NO: 1-80;
(c) nucleotide sequences that are 40-mers of a sequence recited in SEQ ID NO: 1-80; and
(d) nucleotide sequences that are 20-mers of a sequence recited in SEQ ID NO: 1-80;

5. An isolated oligonucleotide probe or primer comprising at least 10 contiguous residues complementary to 10 contiguous residues of a nucleotide sequence recited in any one of claims 1-3.

6. A kit comprising a plurality of oligonucleotide probes or primers of claim 5.

7. A genetic construct comprising a polynucleotide of any one of claims 1-3.

8. A transgenic host cell comprising a genetic construct according to claim 7.

9. A genetic construct comprising, in the 5′-3′ direction:
(a) a gene promoter sequence; and
(b) a polynucleotide sequence comprising at least one of the following: (1) a polynucleotide coding for at least a functional portion of a polypeptide of SEQ ID NO: 81-183; and (2) a polynucleotide comprising a non-coding region of a polynucleotide of any one of claims 1-3.

10. The genetic construct of claim 9, wherein the polynucleotide is in a sense orientation.

11. The genetic construct of claim 9, wherein the polynucleotide is in an anti-sense orientation.

12. The genetic construct of claim 9, wherein the gene promoter sequence is functional in a prokaryote or eukaryote.

13. A transgenic host cell comprising a construct of claim 9.

14. A transgenic organism comprising a transgenic host cell according to claim 13, or progeny thereof.

15. The transgenic organism of claim 15, wherein the organism is selected from the group consisting of Lactobacillus species.

16. A method for modulating the activity of a polypeptide in an organism, comprising stably incorporating into the genome of the organism a polynucleotide of any one of claims 1-3.

17. The method of claim 16, wherein the organism is a microbe.

18. An isolated polypeptide comprising an amino acid sequence selected from the group consisting of: sequences recited in SEQ ID NO: 81-183.

19. An isolated polypeptide comprising an amino acid sequence selected from the group consisting of:
(a) sequences having at least 75% identity to a sequence of SEQ ID NO: 81-183;
(b) sequences having at least 90% identity to a sequence of SEQ ID NO: 81-183; and
(c) sequences having at least 95% identity to a sequence of SEQ ID NO: 81-183, wherein the polypeptide has substantially the same functional properties as a polypeptide of SEQ ID NO: 81-183.

20. An isolated polynucleotide that encodes a polypeptide of any one of claims 18 and 19.

21. An isolated polypeptide encoded by a polynucleotide of any one of claims 1-3.

22. A fusion protein comprising at least one polypeptide according to any one of claims 18 and 19.

23. A composition comprising a polypeptide according to any one of claims 18 and 19 and at least one component selected from the group consisting of: physiologically acceptable carriers and immunostimulants.

24. A composition comprising a polynucleotide according to any one of claims 1-3 and at least one component selected from the group consisting of: physiologically acceptable carriers and immunostimulants.

25. A method for treating a disorder in a mammal, comprising administering a composition according to claim 24.

26. A method for treating a disorder in a mammal, comprising administering a composition according to claim 25.
